(19) United States
(12) Patent Application Publication
(10) Pub. No.: US 2016/0287696 A1
(43) Pub. Date: Oct. 6, 2016

(54) PAN POLLEN IMMUNOGENS AND METHODS AND USES FOR IMMUNE RESPONSE MODULATION

(71) Applicants: LA JOLLA INSTITUTE FOR ALLERGY AND IMMUNOLOGY, La Jolla, CA (US); ALK-ABELLÓ A/S, Hørsholm (DK)

(72) Inventors: Bjoern Peters, La Jolla, CA (US); Alessandro Sette, La Jolla, CA (US); Jason Greenbaum, San Diego, CA (US); Ilka Hoof, Frederiksberg (DK); Lars Harder Christensen, Allerød (DK)

(73) Assignees: La Jolla Institute For Allergy And Immunology, La Jolla, CA (US); ALK-Abelló A/S, Hørsholm (DK)

(21) Appl. No.: 15/037,825

(22) PCT Filed: Nov. 20, 2014
(86) PCT No.: PCT/US2014/066577

§ 371 Date: May 19, 2016

Related U.S. Application Data
(60) Provisional application No. 61/906,821, filed on Nov. 20, 2013.
(60) Provisional application No. 61/946,370, filed on Feb. 28, 2014.

(51) Int. Cl. A61K 39/36; C07K 14/415

(52) U.S. Cl. CPC A61K 39/36; C07K 14/415; A61K 2039/545

(57) ABSTRACT

The invention relates to pan pollen immunogens such as polypeptides, proteins and peptides, and methods and uses of such immunogens for modulating or relieving an immune response in a subject. For example, the immunogens can be used for treating a subject for an allergic immune response or inducing or promoting immunological tolerance to the immunogen or a pollen allergen in a subject.

### GOVERNMENT SUPPORT

[0001] This invention was made with government support under contract NIH-NIAIDHHSN272200700048C awarded by the National Institutes of Health. The government has certain rights in the invention.

### FIELD OF THE INVENTION

[0002] The invention relates to pan pollen immunogens such as polypeptides, proteins and peptides, and methods and uses of such immunogens for modulating or relieving an immune response in a subject, such as treating a subject for an allergic immune response or inducing or promoting immunological tolerance to the immunogen or a pollen allergen in a subject.

### INTRODUCTION

[0003] Patients with pollen allergies are typically poly-sensitized as evidenced by positive RAST- and/or skin prick tests to multiple pollen allergens, like grass, weed and tree pollen allergens. However, today it is not possible to treat multisensitized patients with one immunotherapeutic product. Although several investigators have suggested that immunotherapy with a single grass species such as Timothy grass is sufficient to also treat allergies to other grass pollens due to observed cross-reactivity at the IgE level, it has not been suggested to treat multiple pollen allergies with one single immunogen.

[0004] It is firmly established that allergen-specific T-cells play an important role in allergic inflammation and that induction of antigen specific T regulatory cells (Tregs) or elimination of allergen-specific T helper type 2 cells (Th2) might be a prerequisite for the induction of specific tolerance. Yet, cross-reactivity among multiple pollen families at the T-cell level is less explored.

[0005] Allergen-specific immunotherapy (SIT) is a hyposensitizing immunotherapy introduced in clinical medicine almost a century ago for the treatment of an allergic immune response using the allergens that the subject is sensitized to. An allergic immune response may be mediated by activated allergen-specific Th2 cells, which produce cytokines such as IL-4, IL-5, and IL-13. In healthy individuals, the allergen-specific T-cell response is mediated predominantly by Th1 cells. SIT may reduce the ratio of Th2:Th1 cells and may alter the cytokine profile, reducing the production of IL-4, IL-5, and IL-13 and increasing the production of IFN-gamma in response to major allergens or allergen extracts.

[0006] Despite its efficacy, SIT has several limitations, including safety concerns about giving patients allergenic substances. Because most SIT regimens involve the administration of whole, unfractionated, allergen extracts, adverse IgE-mediated events are a considerable risk. Significant efforts have been devoted to developing approaches to modulate allergen-specific T-cell responses without inducing IgE-meditated, immediate-type reactions. These approaches include developing hypoallergens that do not contain IgE-binding epitopes, allergens that are coupled to adjuvants and carriers of bacterial or viral origin or peptides that contain dominant T-cell epitopes and do not react with IgE in allergic individuals.

[0007] It was recently shown that a large fraction of Timothy Grass-specific T cells target epitopes contained in novel Timothy Grass antigens (NTGA). NTGA's are unrelated to the known allergens of Timothy grass, which mainly are identified based on their high IgE reactivity. International patent application, WO2013/119863 A1, relates to novel antigens (NTGA's) derived from Timothy grass pollen.

[0008] It has also recently been shown and described in International patent application WO2012/049310 that an immunogen derived from an allergenic pollen source is able to reduce an allergic immune response caused by an unrelated allergen via bystander suppression.

[0009] As disclosed herein, immunogens related to recently detected immunogens of Timothy grass pollen (NTGA's) share high sequence conservation/homology to polypeptides identified in several different pollen families and are broadly reactive. Such immunogens have potential therapeutical utilization against immune responses triggered by pollen of a broad array of pollen families.

### SUMMARY

[0010] Disclosed herein are immunogens, also named pan-pollen immunogens, derived from previously detected NTGA's. A pan-pollen immunogen consists of or contain as part of its sequence an amino acid sequence that is conserved across polypeptides detected in a grass pollen and at least one non-grass pollen species, e.g. the non-grass pollen species Ambrosia psilostachya (Amb p), Ambrosia artemisiifolia, (Amb a), Plantago lanceolate (Pla I), Quercus alba (Que a), Betula verrucosa, (Bet v), Fraxinus Excelsior (Fra e) and Olea Europaea, (Ole e). In some embodiments, the immunogens may contain conserved subsequences, e.g. T cell epitope-containing subsequences of previously detected NTGA's, which T cell epitope-containing subsequence is conserved across polypeptides detected in a grass pollen and at least one non-grass pollen species. These are herein named PG+ sequences or PG+ peptides and have less than 3 mismatches to 15 contiguous amino acids of polypeptides detected in a grass pollen species and a non-grass pollen species described herein. Table 1 shows examples on such conserved subsequences (PG+ peptides) derived from previously detected NTGA's. In other embodiments, the immunogens may be larger amino acid sequences containing one or more conserved subsequences of Table 1, for example a wild type sequence of an NTGA. Table 2 shows examples on wild type polypeptides found in Phl p grass pollen, which contain one or more PG+ sequences of Table 1. Still other PG+ containing sequences or sequences with less than 3 mismatches to a PG+ peptide may be found in polypeptides found in non-grass pollen species, e.g. of the plant genera Ambrosia, Quercus and Betula (Table 4). Disclosed herein are also longer conserved regions or stretches that may derive from a wild type polypeptide described herein. A conserved region was defined as the region resulting from merging overlapping conserved 15mer peptides in a Phl p sequence. Table 3 shows conserved regions that are conserved across polypeptides found in grass-, weed- and tree pollen species (herein named GWT sequences). Such GWT sequences may be an immunogen in itself, or may give rise to additional immunogens comprising the entire conserved regions or subsequences thereof.

[0011] In certain embodiments, an immunogen may contain at least one T cell epitope as may be determined by the T cell response observed against immunogens of Tables 1, 2, 3, or 4 in cultured PBMC's obtained from grass pollen allergic donors or alternatively from ragweed, oak and/or birch pollen allergic donors. Furthermore, it was found that a T cell response of grass allergic donors to an immunogen of the invention may be cross reactive to non-grass pollen species, thereby indicating that grass pollen immunogens and its conserved homolog in non-grass pollen families share T cell epitopes. It was in general demonstrated (tendency) that T cells previously stimulated with a PG+ peptide produced a T cell response in response to different non-grass pollen extracts when the mismatch of the PG+ peptide compared to a subsequence of a polypeptide in the non-grass pollen extract was less than 3 mismatches (Table 10, FIG. 1). Therefore, in certain embodiments, the immunogens may contain at least one PG+ peptide disclosed in Table 10, e.g. a PG+ peptide with SEG ID NO: 246, 258 and 315. That is not to exclude that an immunogen may contain another peptide disclosed in Table 10.

[0012] Therefore, the invention relates in a first aspect to a method for relieving an allergic immune response against a pollen allergen, wherein the allergen is not a grass pollen allergen, in a subject in need thereof, comprising administering an effective amount of an immunogenic molecule, wherein said molecule comprises or consists of

[0013] a) a polypeptide, which includes at least one amino acid sequence with 0, 1 or 2 mismatches compared to a sequence selected from any one of SEQ ID NOs: 1-397 set out in Table 1;

[0014] b) a polypeptide comprising an amino acid sequence having at least 65% sequence similarity or identity to a sequence selected from any one of SEQ ID NOs: 398-443 set out in Table 2;

[0015] c) a polypeptide comprising an amino acid sequence having at least 65% sequence similarity or identity to a sequence selected from any one of SEQ ID NOs: 444-664 set out in Table 3; or

[0016] d) a polypeptide comprising an amino acid sequence having at least 65% sequence similarity or identity to a subsequence of at least 15 contiguous amino acid residues of a sequence selected from any of SEQ ID NOs: 444-664 set out in Table 3.

[0017] SEQ ID NOs: 1-397 as set out in Table 1 refers to PG+ peptides, which 15mer amino acid sequence contain less than 3 mismatches to a corresponding sequence identified in a non-grass pollen species, for example across a sequence identified in one or more of the species Amb p, Pla I, Ole e, Fra e, Que a and Bet v.

[0018] SEQ ID NOs: 398-443 as set out in Table 2 refers to wild type sequences of NTGAs identified by combined transcriptomic and Mass Spectrometry analysis, which contain one or more PG+ peptides.

[0019] SEQ ID NOs: 444-664 as set out in Table 3 refers to conserved regions (GWT) that are conserved across polypeptides identified in Phl p pollen (NTGA's) and polypeptides identified in weed pollen (Amb a and/or Amb p) and tree pollen (Que a and/or Bet v).

[0020] Below is shown embodiments specifically related to each of the pan-pollen immunogens identified. For example in embodiment F, a polypeptide relates to NTGA 6, and a polypeptide of option a) includes at least one amino acid sequence with 0, 1 or 2 mismatches compared to a sequence selected from any one of SEQ ID NOs: 52-74; the polypeptide of option b) comprises an amino acid sequence having at least 65% sequence similarity or identity to SEQ ID NOs: 403, the polypeptide of option c) comprises an amino acid sequence having at least 65% sequence similarity or identity to a sequence selected from any one of SEQ ID NOs: 474-479 and polypeptide of option d) comprises an amino acid sequence having at least 65% sequence similarity or identity to a subsequence of at least 15 contiguous amino acid residues of a sequence selected from any of SEQ ID NOs: 474-479 set out in Table 3. Other embodiments (A to AK) may be constructed the same way using the list below:

| | | Polypeptide | Polypeptide | Polypeptide |
|---|---|---|---|---|
| | | option a) | option b) | option c |
| | | PG + | Wild type | and d) GWT |
| | NTGA | Sequence | sequences | sequence |
| Embodiments: | No: | of Table 1: | of Table 2: | of Table 3: |
| Embodiment A | 1 | 1-7 | 398 | 444-449 |
| Embodiment B | 2 | 18-32 | 399 | 450-456 |
| Embodiment C | 3 | 33 | 400 | 457-459 |
| Embodiment D | 4 | 34-45 | 401 | 460-465 |
| Embodiment E | 5/64 | 46-51 | 402 | 466-473 |
| Embodiment F | 6 | 52-74 | 403 | 474-479 |
| Embodiment G | 7 | 75-83 | 404 | 480-485 |
| Embodiment H | 9 | 84-88 | 406 | 486-496 |
| Embodiment I | 10 | 89-91 | 407 | 497-506 |
| Embodiment J | 11 | 92-98 | 408 | 507-515 |
| Embodiment K | 13 | 99-113 | 409 | 516-525 |
| Embodiment L | 19 | 119-123 | 410 | 526-528 |
| Embodiment M | 20 | 124-131 | 411 | 529-530 |
| Embodiment N | 22 | 137-142 | 412 | 531 |
| Embodiment O | 24 | 143-153 | 413 | 532-537 |
| Embodiment P | 26 | 154-161 | 414 | 538-545 |
| Embodiment Q | 27 | 162-166 | 415 | 540-553 |
| Embodiment R | 29 | 168-175 | 416 | 554-561 |
| Embodiment S | 30 | 176-193 | 417 | 532-574 |
| Embodiment T | 34 | 202-211 | 419 | 575-584 |
| Embodiment U | 39/59 | 223-229, | 420 | 585-592 |
| | | 270-277 | | |
| Embodiment V | 43 | 238 | 421-423 | 593 |
| Embodiment X | 47 | 240-242 | 424-425 | 594-598 |
| Embodiment Y | 49/54 | 244-247, | 426-428 | 599-601, |
| | | 257-260 | | 606-613 |
| Embodiment Z | 53 | 252-256 | 431 | |
| Embodiment AA | 56 | 262-265 | 432 | 614-620 |
| Embodiment AB | 62 | 283 | 433 | 621-625 |
| Embodiment AC | 65 | 286-289 | 434 | |
| Embodiment AD | 73 | 308-311 | 435 | 626-632 |
| Embodiment AE | 76 | 312-319 | 436 | 633-640 |
| Embodiment AF | 77 | 320-337 | 437 | 641-648 |
| Embodiment AG | 86/51 | 357-370, | 438-439 | 602-605, |
| | | 249-251 | | 649-658 |
| Embodiment AH | 87 | 371 | 440 | 659-663 |
| Embodiment AI | 89 | 373-393, | 441 | |
| | | 394-396 | | |
| Embodiment AJ | 90 | 394-396 | | |
| Embodiment AK | 91 | 397 | 442-443 | 664 |

[0021] In other embodiments, a polypeptide of option a) includes one or more PG+ peptides from different NTGA's, so as to construct polypeptides with desirable properties. For example one polypeptide of option a) may contain as part of its sequence an amino acid sequence of one or more PG+ peptides selected from any one of SEQ ID NOs 1-397. In particularly, a polypeptide of option a) may include one or more immunodominant PG+ peptides, like those recognized by at least 3 subjects in a population of 20 subjects, e.g. one or more sequences selected from any one of SEQ ID NOs: 23, 24, 32, 57, 59, 60, 64, 65, 67, 68, 74, 75, 76, 78, 83, 143, 148, 244, 246, 258, 387, 391, 393 and 397, or a sequence with 0, 1 or 2 mismatches compared to the SEQ ID NOs: 23, 24, 32, 57, 59, 60, 64, 65, 67, 68, 74, 75, 76, 78, 83, 143, 148, 244, 246, 258, 387, 391, 393 and 397.

[0022] Accordingly, a polypeptide of option c) and d) may also comprise GWT sequences or portions thereof, respectively, that derive from different NTGA's to construct polypeptides with desirable properties, for example high conservation throughout the entire sequence of the polypeptide.

[0023] The invention also relates to a molecule for use as a medicament, in particularly for use in relieving an allergic immune response against a pollen allergen other than a grass pollen allergen in a subject, wherein said molecule comprises or consists of

[0024] a) a polypeptide, which includes at least one amino acid sequence with 0, 1 or 2 mismatches compared to a sequence selected from any one of SEQ ID NOs: 1-397;

[0025] b) a polypeptide comprising an amino acid sequence (being of the same length as) and having at least 65% sequence similarity or identity to a sequence selected from any one of SEQ ID NOs: 398-443;

[0026] c) a polypeptide comprising an amino acid sequence having at least 65% sequence similarity or identity to a sequence selected from any one of SEQ ID NOs: 444-664; or

[0027] d) a polypeptide comprising an amino acid sequence having at least 65% sequence similarity or identity to a subsequence of at least 15 contiguous amino acid residues of a sequence selected from any of SEQ ID NOs: 444-664.

[0028] The invention also relates to the use of a molecule as a medicament, e.g. for the use of a molecule for the preparation of a medicament for relieving an allergic immune response against a pollen allergen other than a grass pollen allergen in a subject, wherein said molecule comprises or consists of

[0029] a) a polypeptide, which includes at least one amino acid sequence with 0, 1 or 2 mismatches compared to a sequence selected from any one of SEQ ID NOs: 1-397;

[0030] b) a polypeptide comprising an amino acid sequence (being of the same length as) and having at least 65% sequence similarity or identity to a sequence selected from any one of SEQ ID NOs: 398-443;

[0031] c) a polypeptide comprising an amino acid sequence having at least 65% sequence similarity or identity to a sequence selected from any one of SEQ ID NOs: 444-664; or

[0032] d) a polypeptide comprising an amino acid sequence having at least 65% sequence similarity or identity to a subsequence of at least 15 contiguous amino acid residues of a sequence selected from any of SEQ ID NOs: 444-664.

[0033] The invention relates in a further aspect to an immunogenic molecule, e.g. a molecule comprising of or consisting of

[0034] b) a polypeptide having at least 65% sequence similarity or identity to a sequence selected from any one of SEQ ID NOs: 398-443; or

[0035] c) a polypeptide having at least 65% sequence similarity or identity to a sequence selected from any one of SEQ ID NOs: SEQ ID NOs: 444-664.

[0036] For example, an immunogenic molecule may contain a conserved sequence of NTGA 6 (embodiment F) of the above table. Thus, in one particular aspect, a molecule comprises or consists of b) a polypeptide having at least 65% sequence similarity or identity to SEQ ID NOs: 403; or comprises or consists of c) a polypeptide having at least 65% sequence similarity or identity to a sequence selected from any one of SEQ ID NOs: 474-479. Other embodiments (A to AK) may be constructed the same way using the list above.

[0037] Also provided are cells expressing an immunogen described herein. In various embodiments, a cell expresses an immunogen. In certain aspects, a cell is a eukaryotic or prokaryotic cell and may be a mammalian, insect, fungal or bacterium cell.

[0038] An immunogen of the present invention is suitable as a reagent, for example in immunotherapy against various pollen allergies including a pollen allergy, which is not grass pollen allergy in a subject.

[0039] In other embodiments, there are provided nucleic acid molecules encoding a polypeptide of option a), b), c) or d) or a molecule comprising a polypeptide of option a), b), c) or d).

[0040] In additional aspects, there are provided compositions, for example pharmaceutical compositions comprising an immunogenic molecule of the invention. In one embodiment, a pharmaceutical composition is suitable for immunotherapy (e.g., treatment, desensitization, tolerance induction, bystander suppression). In certain embodiments, a pharmaceutical composition is a vaccine, i.e. suitable formulated for the purpose of vaccination.

### BRIEF DESCRIPTION OF THE DRAWINGS

[0041] FIG. 1: Conservation in transcriptome predicts peptide cross-reactivity. For each peptide, TG allergic donors were selected that reacted to the peptide after expanding PBMCs in vitro with TG extract. PBMCs were stimulated with individual peptides for 14 days and IL-5 responses were measured by ELISPOT to i) the peptide itself, ii) TG extract, iii) non-TG extracts (e.g. Amb a, Que, Ole e, Bet v, Cyn d), iv) pools of pre-defined peptide pools (P20 and P19) that did or did not contain the peptide as relevant and irrelevant controls. T cell cultures that did not induce a robust response (>=200 SFC) to the peptide itself were excluded. Reponses to extracts and peptide pools are expressed as the relative fraction of the response to the peptide itself, and capped at 100%.

[0042] FIG. 2: Sensitization pattern of an immunogen of the invention (NTGA 86/51): It is shown that the in vitro T-cell response towards NTGA 86/51 is much weaker compared to the response to allergen Phl p 5.

[0043] FIGS. 3A-C: Tolerance induction investigated in mice. Figures show that prophylactic sublingual immunotherapy treatment (SLIT) with NTGA 86/51 in mice is capable of inducing tolerance towards the immunogen itself (3A) as well as towards Phl p extract (3B), as shown by the ability of NTGA 86/51 to reduce the proliferation of cells of splenocytes from treated mice compared to buffer (sham) treated mice. In addition, it was shown that NTGA 6 is capable of inducing tolerance towards itself (3C) as observed by its ability to reduce proliferation of cells of splenocytes.

[0044] FIGS. 4A and 4B: Bystander tolerance induction investigated in mice. As shown in FIG. 4A, prophylactic SLIT treatment with NTGA 86/51 is capable of inducing direct tolerance (towards NTGA 86/51 itself), as demonstrated by reduced proliferation of splenocytes of NTGA 86/51-treated mice compared to buffer treated mice. Furthermore, FIG. 4B shows that SLIT treatment with OVA is also able to downregulate the NTGA 86/51 specific in vitro response, demonstrating bystander tolerance induction by OVA. Likewise, SLIT treatment with NTGA 86/51 is also able to induce bystander tolerance, as demonstrated by the decreased OVA-specific in vitro proliferation of splenocytes from NTGA 86/51-SLIT treated mice compared to buffer treated mice.

### DETAILED DESCRIPTION

[0045] Definitions

[0046] The following terms and phrases shall have the following meaning:

[0047] The term “a” or “an” refers to an indefinite number and shall not only be interpreted as “one” but also may be interpreted to mean “some”, “several” or one or more.

[0048] The term “conserved sequence” is in the present context meant to include that a given sequence contains at least 15 contiguous amino acids within the sequence that has less than 3 mismatches compared to another sequence of 15 amino acid residues. Longer stretches of conserved sequences may contain several numbers of stretches of at least 15 contiguous amino acids having less than 3 mismatches compared to another sequence of 15 amino acids.

[0049] In the present context, e.g. for the purpose of detecting a conserved sequence, the term “mismatch” is meant to include any substitution of an amino acid residue within the 15mer peptide.

[0050] The term “sensitized to” is generally meant to encompass that the subject has been exposed to an immunogen, e.g. an allergen or an antigen, in a manner that the individual's adaptive immune system displays memory to the immunogen, for example that the immunogen has induced detectable IgE antibodies against the immunogen and thus qualifies as an IgE-reactive antigen (allergen) and/or that T-cells stimulated in vitro are able to proliferate under the presence of the immunogen or fragments of the immunogen (e.g. linear peptides).

[0051] The term “allergic immune response” is meant to encompass a hypersensitivity immune response, e.g. type 1 immune response, such as typically an immune response that is associated with the production of IgE antibodies (i.e. IgE-mediated immune response) and/or production of cytokines usually produced by Th2 cells. An allergic immune response may be associated with an allergic disease, for example atopic dermatitis, urticaria, contact dermatitis, allergic conjunctivitis, allergic rhinitis, allergic asthma, anaphylaxis, food allergy and hay fever.

[0052] The term “grass pollen” is meant to designate pollen of the plant family Poaceae, for example pollen of the plant genus Anthoxanthum, Cynodon, Dactylis, Festuca, Holcus, Hordeum, Lolium, Oryza, Paspalum, Phalaris, Phleum, Poa, Secale, Sorghum, Triticum and Zea.

[0053] As used herein, an “immunogen” refers to a substance, including but not limited to a protein, polypeptide or peptide that modifies, e.g. elicits, induces, stimulates, promotes enhances or decreases, reduces, inhibits, suppresses, relieves an immune response when administered to a subject. For example, an immunogen may induce tolerance to itself in a subject. An immune response elicited by an immunogen may include, but is not limited to, a B cell or a T cell response. An immune response can include a cellular response with a particular pattern of lymphokine/cytokine production (e.g., Th1, Th2), a humoral response (e.g., antibody production, like IgE, IgG or IgA), or a combination thereof, to a particular immunogen. Particular immunogens are antigens and allergens.

[0054] The term “an antigen” refers to a particular substance to which an immunoglobulin (Ig) isotype may be produced in response to the substance. For example, an “IgG antigen” refers to an antigen that induces an IgG antibody response. Likewise, an “IgE antigen” refers to an antigen that induces an IgE antibody response (and thus qualifies as an allergen); an “IgA antigen” refers to a substance that induces an IgA antibody response, and so forth. In certain embodiments, such an immunoglobulin (Ig) isotype produced in response to an antigen may also elicit production of other isotypes. For example, an IgG antigen may induce an IgG antibody response in combination with one more of an IgE, IgA, IgM or IgD antibody response. Accordingly, in certain embodiments, an IgG antigen may induce an IgG antibody response without inducing an IgE, IgA, IgM or IgD antibody response.

[0055] The term “allergen” refers to a particular type of a substance that can elicit production of IgE antibodies, such as in predisposed subjects. For example, if a subject previously exposed to an allergen (i.e. is sensitized or is hypersensitive) comes into contact with the allergen again, allergic asthma may develop due to a Th2 response characterized by an increased production of type 2 cytokines (e.g., IL-4, IL-5, IL-9, and/or IL-13) secreted by CD4+ T lymphocytes

[0056] The term “subject” is meant to designate a mammal having an adaptive immune system, such as a human, a domestic animal such as a dog, a cat, a horse or cattle.

[0057] The term “immunotherapy” is meant to encompass treatment of a disease by inducing, enhancing, or suppressing an immune response. Typically, the therapeutically active agent is an immunogen, particularly an antigen, more particularly an allergen. An immunogen may be a protein or a fragment thereof (e.g. immunogenic peptide). Immunotherapy in connection with allergy usually encompasses repeated administration of a sufficient dose of the immunogen/antigen/allergen/ usually in microgram quantities, over a prolonged period of time, usually for more than 3 months, 6 months, 1 year, such as 2 or 3 years, during which period the immunogen may be administered daily or less frequent, such as several times a week, weekly, bi-weekly, or monthly, every second month or quarterly. Immunotherapy can be effected by specific immunotherapy or may be effected by bystander tolerance induction.

[0058] The term “specific immunotherapy” in connection with allergy is meant to designate that immunotherapy is conducted with the administration of an immunogen to which the subject is sensitized to, particularly an immunogen to which the patient has raised specific IgE antibodies to, e.g. major allergens.

[0059] As used herein, the term “immunological tolerance” refers to a) a decreased or reduced level of a specific immunological response (thought to be mediated at least in part by antigen-specific effector T lymphocytes, B lymphocytes, antibody, a combination); b) a delay in the onset or progression of a specific immunological response; or c) a reduced risk of the onset or progression of a specific immunological response to an immunogen, such as an antigen or an allergen. “Specific” immunological tolerance occurs when tolerance is preferentially invoked against certain immunogens in comparison with other immunogens. Tolerance is an active immunogen dependent process and differs from non-specific immunosuppression and immunodeficiency.

[0060] The term “bystander tolerance induction” in connection with allergy is meant to encompass that immunotherapy is conducted with the administration of an immunogen that elicits, induces, stimulates, promotes enhances or decreases, reduces, inhibits, suppresses, relieves an immune response against another unrelated immunogen, for example an allergen, e.g. major allergens of pollen. For example, an immunogen may induce immunological tolerance to itself, and may be able to reactivate T regulatory cells specific to the immunogen to down-regulate an immune response caused by another unrelated immunogen, e.g. an allergen. Thus, an immunogen may induce immunological tolerance to an unrelated antigen, e.g. an allergen including a pollen allergen described herein.

[0061] The term “treatment” refers to any type of treatment that conveys a benefit to a subject afflicted with allergy, including improvement in the condition of the subject (e.g., in one or more symptoms), delay in the onset of symptoms, slowing the progression of symptoms, or induce disease modification etc. Typical symptoms of an allergic reaction are nasal symptoms in the form of itchy nose, sneezing, runny nose, blocked nose; conjunctival symptoms in the form of itchy eyes, red eyes, watery eyes; and respiratory symptoms in the form of decreased lung function. The treatment may also give the benefit that the patient needs less concomitant treatment with corticosteroids or H1 antihistamines to suppress the clinical symptoms. As used herein, “treatment” is not necessarily meant to imply cure or complete abolition of symptoms, but refers to any type of treatment that imparts a benefit to a patient. Treatment may be initiated before the subject becomes sensitized to a protein. This may be realized by initiating immunotherapy before the subject has raised detectable serum IgE antibodies capable of binding specifically to the sensitizing protein or before any other biochemical marker indicative of an allergic immune response can be detected in biological samples isolated from the individual. Furthermore, treatment may be initiated before the subject has evolved clinical symptoms of the allergic disease, such as symptoms of allergic rhinitis, allergic asthma or atopic dermatitis.

[0062] The phrase “therapeutically sufficient amount” or “sufficient amount” is meant to designate an amount effective to reduce, suppress, relieve or eliminate an allergic immune response, e.g. an amount sufficient to achieve the desirable reduction in clinical relevant symptoms or manifestations of the allergic immune response. For example, a therapeutically sufficient amount may be the accumulated dose of a polypeptide, a set of polypeptides administered during a course of immunotherapy in order to achieve the intended effect or it may be the maximal dose tolerated within a given period. The total dose or accumulated dose may be divided into single doses administered daily, twice a week or more, weekly, every second or fourth week or monthly depending on the route of administration and the pharmaceutical formulation used. The total dose or accumulated dose may vary. It is expected that a single dose is in the microgram range, such as in the range of 5 to 500 microgram dependent on the nature of the polypeptide.

[0063] The term “patient responding to therapy,” such as “immunotherapy” is meant to designate that the patient has improvement in the symptoms of the allergic immune response caused by a pollen allergen. Symptoms may be the clinically symptoms of allergic rhinitis, allergic asthma allergic conjunctivitis, atopic dermatitis, food allergy and/or hay fever. Typically, the symptoms are the same as experienced with a flu/cold, sneezing, itching, congestion, coughing, feeling of fatigue, sleepiness and body aches. For example nasal symptoms in the form of itchy nose, sneezing, runny nose, blocked nose; conjunctival symptoms in the form of itchy eyes, red eyes, watery eyes; and respiratory symptoms in the form of decreased lung function. A responder may also be evaluated by monitoring the patient's reduced need for concomitant treatment with corticosteroids or H1 antihistamines to suppress the clinical symptoms. Symptoms may be subjectively scored or in accordance with official guidelines used in clinical trials of SIT.

[0064] The term “adjuvant” refers to a substance that enhances the immune response to an immunogen. Depending on the nature of the adjuvant, it can promote either a cell-mediated immune response, humoral immune response or a mixture of the two.

[0065] As used herein an “epitope” refers to a region or part of an immunogen that elicits an immune response when administered to a subject. In particular embodiments, an epitope is a T cell epitope, i.e., an epitope that elicits, stimulates, induces, promotes, increases or enhances a T cell activity, function or response. An immunogen can be analyzed to determine whether it include at least one T cell epitope using any number of assays (e.g. T cell proliferation assays, lymphokine secretion assays, T cell non-responsiveness studies, etc.). In the context of the present invention, a T-cell epitope refers to an epitope that are MHC Class II binders (i.e. HLA-II binders), for example HLA-II binders shown in Table 9.

[0066] As used herein, the term “immune response” includes T cell (cellular) mediated and/or B cell (humoral) mediated immune responses, or both cellular and humoral responses. Exemplary immune responses include T cell responses, e.g., lymphokine production, cytokine production and cellular cytotoxicity. T-cell responses include Th1 and/or Th2 responses. In addition, the term immune response includes responses that are indirectly affected by T cell activation, e.g., antibody production (humoral responses) and activation of cytokine responsive cells, e.g., eosinophils, macrophages. Immune cells involved in the immune response include lymphocytes, such as T cells (CD4+, CD8+, Th1 and Th2 cells, memory T cells) and B cells; antigen presenting cells (e.g., professional antigen presenting cells such as dendritic cells, macrophages, B lymphocytes, Langerhans cells, and non-professional antigen presenting cells such as keratinocytes, endothelial cells, astrocytes, fibroblasts, oligodendrocytes); natural killer (NK) cells; myeloid cells, such as macrophages, eosinophils, mast cells, basophils, and granulocytes.

[0067] The term “subsequence” or “stretch” means a fragment or part of a longer molecule, e.g. of a full length molecule (e.g. wild type proteins of Tables 2 and 4) or a conserved region thereof (e.g. GWT sequences of Table 3). A subsequence or portion therefore consists of one or more amino acids less than the wild type polypeptide or a conserved region thereof.

[0068] As disclosed herein, some immunogens (NTGA's) recently detected in Timothy grass pollen share substantial identity and similarity with immunogens detected in at least weed or tree pollen. Thus, such immunogens can be used to broadly treat a subject with or at risk of developing an allergic immune response to a pollen allergen of a variety of pollen plant families, or broadly induce or promote tolerance of a subject to a pollen allergen of a variety of pollen plant families and may include promoting or inducing tolerance to the immunogen itself.

[0069] Thus, by the present invention it is now possible to relieve an immune response of a multisensitized subject caused by pollen allergens of different plant families by administering an immunogen described herein. Likewise, it is also now possible to treat subjects with different pollen allergies using the same immunogen or set of immunogens.

[0070] In certain embodiments, the immunogen is a molecule comprising or consisting of a) a polypeptide, which includes at least one amino acid sequence with 0, 1 or 2 mismatches compared to a sequence selected from any one of SEQ ID NOs: 1-397 set out in Table 1 (PG+ peptides). The immunogen may contain at least one T cell epitope optionally a Th-2 cell epitope. Thus, in some embodiments, the polypeptide of option a) includes at least one amino acid sequence with 0, 1 or 2 mismatches to a sequence selected from any one of SEQ ID NOs: 4, 8, 9, 10, 14, 18, 19, 20, 21, 22, 23, 24, 25, 26, 27, 28, 29, 30, 31, 32, 34, 35, 38, 40, 52, 53, 54, 55, 56, 57, 58, 59, 60, 62, 63, 64, 65, 66, 67, 68, 69, 70, 71, 72, 73, 74, 75, 436, 77, 78, 79, 80, 81, 82, 83, 85, 87, 88, 89, 90, 91, 92, 93, 94, 95, 96, 114, 115, 130, 131, 137, 138, 141, 142, 143, 144, 145, 146, 147, 148, 149, 150, 151, 152, 153, 158, 162, 163, 164, 165, 166, 169, 184, 196, 197, 199, 200, 204, 210, 211, 212, 213, 225, 226, 230, 231, 235, 241, 244, 245, 246, 247, 249, 250, 252, 255, 256, 257, 258, 260, 264, 272, 274, 275, 276, 277, 283, 284, 286, 287, 299, 303, 312, 314, 315, 317, 318, 326, 327, 332, 333, 334, 335, 336, 338, 339, 340, 343, 344, 345, 346, 347, 348, 349, 352, 353, 355, 370, 372, 374, 375, 376, 384, 385, 386, 387, 388, 389, 390, 391, 393, 394, 395, 396 and 397.

[0071] In methods and uses described herein, one may consider using an immunogen recognized by a greater number of individuals, for example a polypeptide of option a) that includes at least one amino acid sequence with 0, 1 or 2 mismatches to a sequence selected from any one of SEQ ID NOs: 18, 22, 23, 24, 25, 26, 28, 30, 32, 52, 53, 57, 58, 59, 60, 64, 65, 66, 67, 68, 70, 72, 73, 74, 75, 76, 78, 80, 82, 83, 85, 87, 91, 93, 95, 115, 141, 143, 145, 146, 147, 148, 152, 164, 245, 246, 258, 275, 315, 376, 385, 386, 387, 388, 389, 391, 393, 394, 395, 396 and 397. For example, the immunogen may be recognized by at least 3 subjects in a population of 20 subjects, e.g. wherein the polypeptide of option a) includes at least one amino acid sequence with 0, 1 or 2 mismatches to a sequence selected from any one of SEQ ID NOs: 23, 24, 32, 57, 59, 60, 64, 65, 67, 68, 74, 75, 76, 78, 83, 143, 148, 244, 246, 258, 387, 391, 393 and 397.

[0072] In some embodiments, the number of amino acid mismatches is 0 or 1, for example the immunogen may be a molecule comprising or consisting of a) a polypeptide, which includes at least one amino acid sequence with 0 or 1 mismatches compared to a sequence selected from any one of SEQ ID NOs: 10, 13, 21, 23, 28, 32, 36, 51, 63, 80, 81, 99, 100, 109, 110, 111, 120, 121, 122, 125, 135, 137, 139, 140, 149, 156, 158, 160, 161, 164, 184, 197, 198, 199, 200, 207, 230, 231, 233, 246, 260, 305, 339, 340, 359, 360, 361, 367, 368, 369, 370 and 395.

[0073] In certain embodiments, the immunogen is a molecule comprising at least one of the PG+ peptides of Table 1, e.g. a wild type protein found in pollen of the genus Phleum (e.g. Pleum Pratense). Therefore, an immunogen molecule of the invention, may consist of or comprise a polypeptide of option b) comprising an amino acid sequence having at least 65% sequence similarity or identity to a sequence selected from any one of SEQ ID NOs: 398-443 set out in Table 2 (including NTGA's 1, 2, 3, 4, 6, 7, 9, 10, 11, 13, 19, 20, 22, 24, 26, 27, 29, 30, 32, 34, 43, 44, 47, 53, 56, 62, 65, 73, 76, 77, 87, 89, 91, 5/64, 39/59, 49/54 and 86/51. A polypeptide of option b) may contain at least one T cell epitope, for example NTGA's 1, 2, 4, 6, 7, 9, 10, 11, 20, 22, 24, 26, 27, 29, 30, 32, 34, 47, 49, 51, 53, 56, 62, 65, 76, 77, 86, 89, 91, 5/64, 39/59, 49/54, and 86/51. Thus, in some embodiments, a polypeptide of option b) comprises an amino acid sequence with at least 65% similarity or identity to a sequence selected from any of SEQ ID NOs: 398, 399, 401, 403, 404, 406, 407, 408, 411, 412, 413, 414, 415, 416, 417, 418, 419, 424, 429 431, 432, 433, 434, 436, 437, 441, 443, 402, 420, 426 and 438-439.

[0074] In methods and uses described herein, one may consider using an immunogen containing many PG+ peptides, such as at least five PG+ peptides of Table 1 (NTGA's 1, 2, 4, 6, 7, 13, 19, 20, 22, 24, 26, 27, 30, 32, 34, 76, 77, 89, 5/64, 39/59, 49/54, 86/51). Thus, in some embodiments the polypeptide of option b) comprises an amino acid sequence with at least 65% similarity or identity to a sequence selected from any one of SEQ ID NOs: 398, 399, 401, 403, 404, 409, 410, 411, 412, 413, 414, 415, 417, 418, 419, 436, 437, 441, 402, 420, 426, and 438-439 set out in Table 2.

[0075] An immunogen may contain at least eight PG+ peptides of Table 1 (NTGA's 1, 2, 4, 6, 7, 13, 24, 30, 34, 76, 77, 89, 5/64, 39/59, 49/54, 86/51). Thus, in some embodiments the polypeptide of option b) comprises an amino acid sequence with at least 65% similarity or identity to a sequence selected from any one of SEQ ID NOs: 398, 399, 401, 403, 404, 409, 413, 417, 419, 436, 437, 441, 402, 420, 426, 438-439 set out in Table 2.

[0076] In other embodiments, one may consider using an immunogen with the potential to produce or induce a T cell response in a greater fraction of the population, for example NTGA's numbered 2, 6, 7, 9, 10, 11, 22, 24, 27, 49/54, 39/59, 76, 89, 91. Thus, a polypeptide of option b) may comprise an amino acid sequence with at least 65% similarity or identity to a sequence selected from any of SEQ ID NOs: 399, 403, 404, 406, 407, 408, 412, 413, 415, 426, 420, 436, 441 and 443. In some embodiments, the polypeptide is recognized by at least 3 subjects of a population of 20 subjects, for example a polypeptide of option b) may comprise an amino acid sequence with at least 65% similarity or identity to a sequence selected from any of SEQ ID NOs: 399, 403, 404, 413, 426, 441 and 443 (NTGA's 2, 6, 7, 49/54, 89 and 91).

[0077] As mentioned, methods and uses described herein relate to relieving an allergic immune response against a pollen allergen, which is not a grass pollen allergen, for example not a grass pollen allergen of the plant family Poales. The plant family Poales typically encompasses plant genera from any of Anthoxanthum, Conydon, Dactylis, Lollium, Phleum or Poa. In a particular embodiment, the allergic immune response is not against a grass pollen allergen of the plant genus Phleum, e.g. Phleum Pratense.

[0078] An immunogen of the present invention is conserved across a grass pollen (for example of at least grass pollen of Phleum Pratense (Phl p)) and at least one non-grass pollen species. Therefore, immunogens of the present invention may be used in relieving an allergic immune response against a non-grass pollen allergen. For example, an immunogen of the present invention may be used in relieving an allergic immune response against a pollen allergen of a plant family from any of Asteraceae, Betulaceae, Fagaceae, Oleaceae, and Plantaginaceae, for example of a plant genus selected any of Ambrosia, Artemisia, Helianthus, Alnus, Betula, Carpinus, Castanea, Corylus, Ostrya, Ostryopsis, Fagus, Quercus, Fraxinus, Ligustrum, Lilac, or Plantago provided that the immunogen identified in Phl p pollen is conserved to an immunogen of the particular selected non-grass pollen species. As shown, herein many immunogens are conserved across the plant genera Ambrosia, Betula, Fraxinus, Quercus, or Plantago. Thus, an immunogen of the present invention may be used in relieving an allergic immune response against a pollen allergen of a plant genus selected from any of Ambrosia, Betula, Fraxinus, Quercus and/or Plantago.

[0079] Advantageously, the methods and uses described herein, comprises relieving an allergic immune response against pollen allergens of different pollen families, for example at least pollen allergens of weed and tree pollen. This is not meant to exclude that an immunogen of the present invention may in addition be used to treat an allergic immune response against a grass pollen allergen, for example against a grass pollen allergen of a plant genus selected from any of Anthoxanthum, Conydon, Dactylis, Lollium, Phleum or Poa, in particularly of the plant genus Phleum.

[0080] In particular embodiments, the immunogenic molecule consists of or comprises an amino acid sequence conserved across a polypeptide found in a grass pollen and a weed pollen and therefore is eligible for being used as a reagent in relieving at least an allergic immune response against a weed pollen allergen of the genus Ambrosia in a subject, e.g. in a subject at least sensitized to a weed pollen allergen of the genus Ambrosia and optionally also sensitized to a grass pollen allergen. For example, the immunogen may consist of or comprise a polypeptide of option a) that includes at least one amino acid sequence with 0, 1 or 2 mismatches to a sequence selected from any one of SEQ ID NOs: 2, 3, 4, 5, 6, 7, 8, 9, 10, 11, 12, 13, 14, 15, 20, 21, 22, 23, 24, 25, 26, 27, 28, 29, 30, 31, 32, 33, 34, 35, 36, 37, 38, 39, 40, 42, 43, 44, 45, 46, 48, 49, 50, 51, 53, 54, 55, 56, 58, 59, 60, 61, 62, 63, 64, 65, 66, 67, 68, 69, 70, 7375, 76, 77, 78, 79, 80, 81, 83, 84, 85, 86, 87, 95, 97, 98, 99, 100, 101, 102, 103, 104, 105, 106, 107, 109, 110, 111, 114, 115, 116, 118, 120, 121, 122, 123, 125, 126, 127, 128, 129, 131, 132, 133, 134, 135, 136, 137, 138, 139, 140, 141, 142, 145, 146, 147, 149, 150, 151, 152, 153, 154, 155, 156, 157, 158, 159, 160, 161, 162, 163, 164, 166, 167, 169, 170, 171, 172, 175, 179, 180, 181, 182, 184, 186, 187, 189, 190, 191, 192, 193, 196, 197, 198, 199, 200, 201, 202, 203, 204, 205, 206, 207, 209, 210, 211, 212, 214, 215, 216, 217, 218, 223, 224, 225, 226, 227, 228, 229, 230, 231, 232, 233, 234, 235, 236, 237, 239, 242, 244, 245, 246, 247, 249, 251, 256, 257, 258, 259, 260, 264, 265, 266, 267, 268, 269, 271, 273, 275, 276, 277, 278, 280, 281, 282, 283, 284, 291, 292, 294, 296, 298, 299, 300, 301, 302, 304, 305, 306, 308, 309, 311, 325, 326, 327, 328, 329, 330, 331, 333, 336, 337, 339, 340, 341, 343, 344, 345, 348, 351, 352, 353, 354, 355, 357, 359, 360, 361, 362, 363, 364, 366, 367, 368, 369, 370, 371, 381, 394, 395, 396 and 397, including SEQ ID NOs with proven T cell response reactivity (SEQ ID NOs: 4, 8, 9, 10, 14, 20, 21, 22, 23, 24, 25, 26, 27, 28, 29, 30, 31, 32, 34, 35, 38, 40, 53, 54, 55, 56, 58, 59, 60, 62, 63, 64, 65, 66, 67, 68, 69, 70, 73, 75, 76, 77, 78, 79, 80, 81, 83, 85, 87, 95, 114, 115, 131, 137, 138, 141, 142, 145, 146, 147, 149, 150151, 152, 153, 158, 162, 163, 164, 166, 169, 184, 196, 197, 199, 200, 204, 210, 211, 212, 225, 226, 230, 231, 235, 244, 245, 246, 247, 249, 256, 257, 258, 260, 264, 275, 276, 277, 283, 284, 299, 326, 327, 333, 336, 339, 340, 343, 344, 345, 348, 352, 353, 355, 370, 394, 395, 396 and 397).

[0081] In some embodiments thereof, the immunogen is a molecule containing at least 5 PG+ peptides with conservation across a grass pollen and a weed pollen, for example a molecule consisting of or comprising a polypeptide of option b) comprising an amino acid sequence with at least 65% similarity or identity to a sequence selected from any of SEQ ID NOs: 398, 399, 401, 403, 404, 411, 412, 413, 414, 416, 417, 418, 419, 437, 402, 420, 426, 438-439 (NTGA's 1, 2, 4, 6, 7, 20, 22, 24, 26, 29, 30, 32, 34, 77, 5/64, 39/59, 49/54 and 86/51)

[0082] In some embodiments thereof, the immunogen is a molecule containing at least 8 PG+ peptides with conservation across a grass pollen and in a weed pollen, for example a molecule consisting of or comprising a polypeptide of option b) comprising an amino acid sequence with at least 65% similarity or identity to a sequence selected from any of SEQ ID NOs: 398, 399, 401, 403, 404, 409, 413, 414, 417,419, 437, 402, 420, 426, 438-439. (NTGA's 1, 2, 4, 6, 7, 24, 26, 30, 34, 77, 5/64, 39/59, 49/54 and 86/51).

[0083] In other particular embodiments, the immunogen consists of or comprises an amino acid sequence conserved across polypeptides found in a grass pollen and a tree pollen and therefore is eligible for being used as a reagent in relieving at least an allergic immune response against a tree pollen allergen of the plant genus Quercus or Betula in a subject, e.g. in a subject at least sensitized to a tree pollen allergen of the genus Quercus or Betula and optionally also sensitized to a grass pollen allergen. For example, the immunogen may consist of or comprises a polypeptide of option a) that includes at least one amino acid sequence with 0, 1 or 2 mismatches to a sequence selected from any one of SEQ ID NOs: 1, 2, 3, 4, 5, 6, 7, 8, 9, 10, 11, 12, 13, 14, 15, 18, 19, 20, 21, 23, 24, 25, 26, 27, 28, 29, 30, 31, 32, 33, 34, 35, 36, 37, 39, 40, 41, 42, 43, 44, 45, 46, 47, 48, 49, 50, 51, 53, 55, 56, 58, 59, 60, 61, 62, 63, 64, 65, 66, 67, 68, 6970, 71, 72, 73, 74, 75, 76, 77, 78, 79, 80, 81, 82, 83, 84, 85, 88, 89, 90, 91, 92, 95, 97, 98, 99, 100, 101, 103, 104, 105, 106, 107, 108, 109, 110, 111, 112, 113, 114, 115, 117, 119, 120, 121, 122, 123, 124, 125, 126, 128, 129, 130, 131, 132, 133, 134, 135, 136, 137, 138, 139, 140, 141, 143, 145, 146, 147, 148, 149, 150, 151, 152, 153, 154, 155, 156, 158, 159, 160, 161, 162, 163, 164, 165, 166, 169, 172, 176, 178, 179, 180, 181, 182, 184, 186, 187, 189, 190, 191, 192, 193, 194, 195, 196, 197, 198, 199, 200, 201, 202, 203, 204, 205, 206, 207, 208, 209, 210, 212, 214, 215, 216, 217, 218, 219, 220, 222, 223, 224, 226, 228, 229, 230, 231, 232, 233, 234, 235, 236, 237, 238, 239, 241, 242, 244, 245, 246, 247, 248, 249, 250, 251, 253, 254, 255, 256, 257, 258, 259, 260, 261, 263, 264, 266, 267, 268, 269, 270, 271, 272, 273, 274, 276, 277, 278, 280, 281, 283, 284, 285, 286, 287, 288, 290, 292, 294, 295, 296, 297, 298, 299, 300, 301, 302, 304, 305, 306, 308, 310, 311, 312, 313, 314, 315, 316, 317, 318, 319, 320, 321, 322, 323, 324, 325, 327, 328, 329, 330, 331, 333, 336, 337, 338, 339, 340, 341, 343, 344, 345, 346, 347, 348, 349, 350, 351, 352, 353, 354, 355, 357, 358, 359, 360, 361, 363, 364, 365, 366, 367, 368, 369, 370, 371, 372, 373, 374, 376, 377, 378, 379, 380, 381, 382, 383, 384, 385, 386, 388, 389, 390, 391, 392, 393, 394, 395, 396 and 397, including SEQ ID NOs with proven T cell response reactivity (SEQ ID NOs: 4, 8, 9, 10, 14, 18, 19, 20, 21, 23, 24, 25, 26, 27, 28, 29, 30, 31, 32, 34, 35, 40, 53, 55, 56, 58, 59, 60, 62, 63, 64, 65, 66, 67, 68, 69, 70, 71, 72, 73, 74, 75, 76, 77, 78, 79, 80, 81, 82, 83, 85, 88, 89, 90, 91, 92, 95, 114, 115, 130, 131, 137138, 141, 143, 145, 146, 147, 148, 149, 150, 151, 152, 153, 158, 162, 163, 164, 165, 166, 169, 184, 196, 197, 199, 200, 204, 210, 212, 226, 230, 231, 235, 241, 244, 245, 246, 247, 249, 250, 255, 256, 257, 258, 260, 264, 272, 274, 276, 277, 283, 284, 286, 287, 299, 312, 314, 315, 317, 318, 327, 333, 336, 338, 339, 340, 343, 344, 345, 346, 347, 348, 349, 352, 353, 355, 370, 372, 374, 376, 384, 385, 386, 388, 389, 390, 391, 393, 394, 395, 396 and 397).

[0084] In some embodiments thereof, the immunogen is a molecule containing at least 5 PG+ peptides with conservation across a grass pollen and a tree pollen, for example a molecule consisting of or comprising a polypeptide of option b) comprising an amino acid sequence with at least 65% similarity or identity to a sequence selected from any of SEQ ID NOs: 398, 399, 401, 403, 404, 409, 410, 411, 412, 413, 414, 415, 417, 418, 419, 436, 437, 441, 402, 420, 426, 438-439 (NTGA's 1, 2, 4, 6, 7, 13, 19, 20, 22, 24, 26, 27, 30, 32, 34, 76, 77, 89, 5/64, 39/59, 49/54, 86/51.)

[0085] In some embodiments thereof, the immunogen is a molecule containing at least 8 PG+ peptides with conservation across a grass pollen and a tree pollen, for example a molecule consisting of or comprising a polypeptide of option b) comprising an amino acid sequence with at least 65% similarity or identity to a sequence selected from any of SEQ ID NOs: 398, 399, 401, 403, 404, 409, 413, 417, 419, 436, 437, 441, 402, 420, 426, 438-439 (NTGA's 1, 2, 4, 6, 7, 13, 24, 30, 34, 76, 77, 89, 5/64, 39/59, 49/54 and 86/51).

[0086] In other particular embodiments, the immunogen consists of or comprises an amino acid sequence conserved across polypeptides found in a grass pollen, a weed pollen and a tree pollen and therefore is eligible for being used as a reagent in relieving at least an allergic immune response against a weed pollen allergen of the genus Ambrosia and/or a tree pollen allergen of the plant genus Quercus or Betula in a subject, e.g. in a subject at least sensitized to a weed pollen allergen of the plant genus Ambrosia, and/or a tree pollen allergen of the genus Quercus or Betula and optionally also sensitized to a grass pollen allergen. For example, the immunogen may consist of or comprising a polypeptide of option a) that includes at least one amino acid sequence with 0, 1 or 2 mismatches to a sequence selected from any one of SEQ ID NOs: 2, 3, 4, 5, 6, 7, 8, 9, 10, 11, 12, 13, 14, 15, 20, 21, 23, 24, 25, 26, 27, 28, 29, 30, 31, 32, 33, 34, 35, 36, 37, 39, 40, 42, 43, 44, 45, 46, 48, 49, 50, 51, 53, 55, 56, 58, 59, 60, 61, 62, 63, 64, 65, 66, 67, 68, 69, 70, 73, 75, 76, 7778, 79, 80, 81, 83, 84, 85, 95, 97, 98, 99, 100, 101, 103, 104, 105, 106, 107, 109, 110, 111, 114, 115, 120, 121, 122, 123, 125, 126, 128, 129, 131, 132, 133, 134, 135, 136, 137, 138, 139, 140, 141, 145, 146, 147, 149, 150, 151, 152, 153, 154, 155, 156, 158, 159, 160, 161, 162, 163, 164, 166, 169, 172, 179, 180, 181, 182, 184, 186, 187, 189, 190, 191, 192, 193, 196, 197, 198, 199, 200, 201, 202, 203, 204, 205, 206, 207, 209, 210, 212, 214, 215, 216, 217, 218, 223, 224, 226, 228, 229, 230, 231, 232, 233, 234, 235, 236, 237, 239, 242, 244, 245, 246, 247, 249, 251, 256, 257, 258, 259, 260, 264, 266, 267, 268, 269, 271, 273, 276, 277, 278, 280, 281, 283, 284, 292, 294, 296, 298, 299, 300, 301, 302, 304, 305, 306, 308, 311, 325, 327, 328, 329, 330, 331, 333, 336, 337, 339, 340, 341, 343, 344, 345, 348, 351, 352, 353, 354, 355, 357, 359, 360, 361, 363, 364, 366, 367, 368, 369, 370, 371, 381, 394, 395, 396 and 397, including SEQ ID NOs with proven T cell response reactivity (SEQ ID NOs: 4, 8, 9, 10, 14, 20, 21, 23, 24, 25, 26, 27, 28, 29, 30, 31, 32, 34, 35, 40, 53, 55, 56, 58, 59, 60, 62, 63, 64, 65, 66, 67, 68, 69, 70, 73, 75, 76, 77, 78, 79, 80, 81, 83, 85, 95, 114, 115, 131, 137, 138, 141, 145, 146, 147, 149, 150, 151, 152, 153, 158, 162, 163, 164, 166, 169, 184, 196, 197, 199, 200, 204, 210, 212, 226, 230, 231, 235, 244, 245, 246, 247, 249, 256, 257, 258, 260, 264, 276, 277, 283, 284, 299, 327, 333, 336, 339, 340, 343, 344, 345, 348, 352, 353, 355, 370, 394, 395, 396 and 397).

[0087] In some embodiments thereof, the immunogen is a molecule containing at least 5 PG+ peptides with conservation across a grass pollen, a weed pollen and a tree pollen, for example a molecule consisting of or comprising a polypeptide of option b) comprising an amino acid sequence with at least 65% similarity or identity to a sequence selected from any of SEQ ID NOs: 398, 399, 401, 403, 404, 409, 411, 412, 413, 414, 417, 418, 419, 437, 420, 426, 438-439 (NTGA's 1, 2, 4, 6, 7,13, 20, 22, 24, 26, 30, 32, 34, 77, 39/59, 49/54 and 86/51).

[0088] In some embodiments thereof, the immunogen is a molecule containing at least 8 PG+ peptides with conservation across a grass pollen, a weed pollen and a tree pollen, for example a molecule consisting of or comprising a polypeptide of option b) comprising an amino acid sequence with at least 65% similarity or identity to a sequence selected from any of SEQ ID NOs: 398, 399, 401, 403, 404, 409, 413, 417, 419, 420, 426, 438-439 (NTGA's 1, 2, 4, 6, 7, 13, 24, 30, 34, 39/59, 49/54, 86/51).

[0089] In still some embodiments thereof, the immunogen comprises conserved regions (GWT) conserved across polypeptides identified in a grass, a weed and a tree pollen. Thus, in some embodiments the immunogen is a molecule consisting of or comprising a polypeptide of option c) comprising an amino acid sequence having at least 65% sequence similarity or identity to a sequence selected from any one of SEQ ID NOs: 444-449, 450-456, 457-459, 460-465, 466-473, 474-479, 480-485, 486-496, 497-506, 507-515, 516-525, 526-528, 529-530, 531, 532-537, 538-545, 540-553, 554-561, 532-574, 575-584, 585-592, 593, 594-598, 599-601, 606-613, 614-620, 621-625, 626-632, 633-640, 641-648, 602-605, 649-658, 659-663 and 664 as set out in Table 3. GWT sequences of Table 3 is contained in NTGA's 1, 2, 3, 4, 5/64, 6, 7, 9, 10, 11, 13, 19, 20, 22, 24, 26, 27, 29, 30, 34, 39, 51, 43, 47, 49/54, 56, 62, 73, 76, 77, 86/51, 87 and 91, respectively. As may be observed from Table 3, the GWT sequences of NTGA's 19, 20, 26, 30, 77 and 91 include longer conserved stretches covering a considerable portion of the wild type sequence. For example, NTGA 91 is highly conserved across the wild type sequences found in pollen of at least the genera Phleum, Ambrosia and Quercus.

[0090] In still other particular embodiments, the immunogen consists of or comprises an amino acid sequence conserved across polypeptide identified in the plant genera Ambrosia, Plantago, Fraxinus, Olea and Quercus and therefore is eligible for being used as a reagent in relieving at least an allergic immune response against a pollen allergen of the plant genera Ambrosia, Plantago, Fraxinus, Olea and Quercus in a subject, e.g. in a subject at least sensitized to a pollen allergen of the plant genera Ambrosia, Plantago, Fraxinus, Olea and Quercus and optionally also sensitized to a grass pollen allergen. For example, the immunogen may consist of or comprising a polypeptide of option a) that includes at least one amino acid sequence with 0, 1 or 2 mismatches to a sequence selected from any one of SEQ ID NOs: 2, 4, 5, 6, 7, 8, 9, 10, 11, 12, 13, 15, 20, 21, 23, 25, 26, 27, 28, 31, 32, 34, 35, 36, 37, 39, 40, 42, 43, 44, 49, 50, 51, 53, 56, 59, 60, 61, 63, 64, 67, 68, 69, 70, 75, 76, 77, 79, 80, 81, 84, 85, 95, 97, 98, 99, 100, 101, 103, 104, 105, 107109, 110, 111, 114, 115, 120, 121, 122, 123, 125, 126, 128, 129, 131, 132, 133, 134, 135, 136, 137, 138, 139, 140, 141, 145, 146, 147, 149, 150, 151, 152, 153, 154, 155, 156, 158, 159, 160, 161, 163, 164, 166, 169, 172, 179, 180, 181, 182, 184, 186, 187, 189, 190, 191, 192, 193, 196, 197, 198, 199, 200, 201, 202, 203, 204, 205, 206, 207, 209, 212, 214, 215, 216, 217, 223, 226, 228, 230, 231, 232, 233, 234, 235, 236, 237, 239, 244, 245, 246, 247, 249, 251, 256, 257, 258, 260, 264, 266, 267, 268, 269, 273, 277, 278, 284, 292, 294, 298, 299, 300, 301, 302, 304, 305, 306, 311, 325, 327, 329, 330, 331, 333, 336, 337, 339, 340, 341, 348, 351, 352, 353, 354, 355, 357, 359, 360, 361, 363, 364, 366, 367, 368, 369, 370, 371, 394, 395, 396 and 397, including SEQ ID NOs with proven T cell response reactivity (SEQ ID NOs: 4, 8, 9, 10, 20, 21, 23, 25, 26, 27, 28, 31, 32, 34, 35, 40, 53, 56, 59, 60, 63, 64, 67, 68, 69, 70, 75, 76, 77, 79, 80, 81, 85, 95, 114, 115, 131, 137, 138, 141, 145, 146, 147, 149, 150, 151, 152, 153, 158, 163, 164, 166, 169, 184, 196, 197, 199, 200, 204, 212, 226, 230231, 235, 244, 245, 246, 247, 249, 256, 257, 258, 260, 264, 277, 284, 299, 327, 333, 336, 339, 340, 348, 352, 353, 355, 370, 394, 395, 396 and 397).

[0091] In some embodiments thereof, the immunogen is a molecule containing at least 5 PG+ peptides with conservation across across the plant genera Ambrosia, Plantago, Fraxinus, Olea and Quercus, for example a molecule consisting of or comprising a polypeptide of option b) comprising an amino acid sequence with at least 65% similarity or identity to a sequence selected from any of SEQ ID NOs: 398, 399, 401, 403, 404, 409, 411, 412, 413, 414, 417, 418, 419, 437,420, 426 and 438-439 (NTGA's 1, 2, 4, 6, 7,13, 20, 22, 24, 26, 30, 32, 34, 77, 39/59, 49/54 and 86/51)

[0092] In some embodiments thereof, the immunogen is a molecule containing at least 8 PG+ peptides with conservation across across the plant genera Ambrosia, Plantago, Fraxinus, Olea and Quercus, for example a molecule consisting of or comprising a polypeptide of option b) comprising an amino acid sequence with at least 65% similarity or identity to a sequence selected from any of SEQ ID NOs: of 398, 399, 401, 403, 409, 413, 417, 420, 426 and 438-439. (NTGA's 1, 2, 4, 6, 13, 24, 30, 39/59, 49/54 and 86/51).

[0093] In still other particular embodiments, the immunogen consists of or comprises amino acid sequences conserved across polypeptides identified in the plant genera Ambrosia, Plantago, Fraxinus, Olea, Quercus and Betula and therefore is eligible for being used as a reagent in relieving at least an allergic immune response against a pollen allergen of the plant genera Ambrosia, Plantago, Fraxinus, Olea, Quercus and Betula in a subject, e.g. in a subject at least sensitized to a pollen allergen of the plant genera Ambrosia, Plantago, Fraxinus, Olea, Quercus and Betula and optionally also sensitized to a grass pollen allergen. For example, the immunogen may consist of or comprising a polypeptide of option a) that includes at least one amino acid sequence with 0, 1 or 2 mismatches to a sequence selected from any one of SEQ ID NOs: 4, 5, 6, 7, 8, 9, 10, 11, 12, 13, 15, 20, 21, 23, 25, 26, 27, 28, 31, 32, 34, 35, 36, 37, 39, 40, 42, 43, 49, 50, 51, 53, 56, 59, 60, 61, 63, 64, 67, 68, 69, 70, 75, 76, 77, 79, 80, 81, 84, 85, 95, 98, 99, 100, 101, 103, 105, 107, 109, 110, 111, 114, 115, 120, 121, 122, 123, 125, 126, 129, 131, 135, 137, 138, 139, 140, 145, 146, 147, 149, 150, 151, 152, 153, 154, 155, 156, 158, 159, 160, 161, 163, 164, 166, 172, 179, 180, 181, 182, 184, 186, 189, 190, 191, 192, 193, 196, 197, 198, 199, 200, 202, 203, 204, 205, 206, 207, 209, 212, 214, 215, 216, 217, 223, 226, 228, 230, 231, 232, 233, 234, 235, 236, 237, 239, 251, 264, 266, 273, 277, 278, 284, 292, 294, 299, 300, 304, 305, 306, 325, 327, 329, 330, 331, 333, 336, 339, 340, 341, 348, 351, 352, 353, 354, 355, 357, 359, 360, 361, 363, 364, 366, 367, 368, 369, 370, 371, 394, 395, 396 and 397, including SEQ ID NOs with proven T cell response reactivity (SEQ ID NOs: 4, 8, 9, 10, 20, 21, 23, 25, 26, 27, 28, 31, 32, 34, 35, 40, 53, 56, 59, 60, 63, 64, 67, 68, 69, 70, 75, 76, 77, 79, 80, 81, 85, 95, 114, 115, 131, 137, 138, 145, 146, 147, 149, 150, 151, 152, 153, 158, 163, 164, 166, 184, 196, 197, 199, 200, 204, 212, 226, 230, 231, 235, 264, 277, 284, 299, 327, 333, 336, 339, 340, 348, 352, 353, 355, 370, 394, 395, 396 and 397).

[0094] In some embodiments thereof, the immunogen is a molecule containing at least 5 PG+ peptides with conservation across across the plant genera Ambrosia, Plantago, Fraxinus, Olea and Quercus and Betula, for example a molecule consisting of or comprising a polypeptide of option b) comprising an amino acid sequence with at least 65% similarity or identity to a sequence selected from any of SEQ ID NOs: 398, 399, 401, 403, 404, 409, 411, 412, 413, 414, 417, 418, 419, 437, 420, 426 and 438-439 (NTGA's 1, 2, 4, 6, 7, 13, 20, 22, 24, 26, 30, 32, 34, 77, 39/59, 49/54 and 86/51.)

[0095] In some embodiments thereof, the immunogen is a molecule containing at least 8 PG+ peptides with conservation across across the plant genera Ambrosia, Plantago, Fraxinus, Olea and Quercus and Betula, for example a molecule consisting of or comprising a polypeptide of option b) comprising an amino acid sequence with at least 65% similarity or identity to a sequence selected from any of SEQ ID NOs: of 398, 399, 401, 403, 409, 413, 417, 420, 426 and438-439. (NTGA's 1, 2, 4, 6, 13, 24, 30, 39/59, 49/54 and 86/51.)

[0096] As mentioned, an immunogen of the invention may relieve an allergic immune response to a pollen allergen. Immunogens eligible for relieving an allergic immune response to an allergen unrelated to the immunogen is thought, at least in part, to be mediated via bystander tolerance induction, which mechanism requires, at least in part, co-existence of the immune response triggering allergen and the unrelated immunogen at the target organ.

[0097] Therefore, a polypeptide of option a), b), c) or d) may be derived from a wild type protein that co-releases/co-elutes with the pollen allergen that the subject is sensitized to and to which allergen the allergic immune response is sought relieved. In the present context, where multiple pollen allergies should be treated using one immunogen or a set of immungens, the wild type sequence of a polypeptide may be able to be “co-released” from multiple different pollen species.

[0098] In the present context, the term “co-release” or “co-elute” refers to an immunogen that starts release from a hydrated pollen within a period overlapping with a major allergen to which the allergic immune response is sought relieved. As major allergens start release from pollen within few minutes after hydration of pollen and continues to be released within the next 30 or 60 minutes, the term “co-release” or “co-elute” may refers to that an immunogen of the invention starts being released from pollen within 30 minutes after hydration of the pollen.

[0099] For example, a polypeptide of option a), option b), option c) or option d) may be derived from a polypeptide that co-releases with a major allergen from grass pollen of the genera Phleum and at least from a weed pollen of the genera Ambrosia.

[0100] Thus, in some embodiments, a polypeptide of option b) comprises an amino acid sequence with at least 65% similarity or identity to a sequence selected from any of SEQ ID NOs: 398, 401, 402, 403, 404, 413, 414, 416, 417, 420, 424-425, 438-439 and 442-443 (NTGA's 1, 4, 6, 7, 24, 26, 29, 30, 39, 47, 51, 59, 64, 86, 91, 5/64, 39/59 and 51/86 that starts release within 30 minutes after hydration from both grass and weed pollen); or a polypeptide of option a) that includes at least one amino acid sequence with 0, 1 or 2 mismatches to a sequence selected from any one of SEQ ID NOs:1-7, 34-45, 46-51, 52-74, 75-83, 143-153, 154-161, 168-175, 176-193, 223-229, 270-277, 240-242, 357-370,249-251 and 397; or a polypeptide of option c) comprises an amino acid sequence having at least 65% sequence similarity or identity to a sequence selected from any one of SEQ ID NOs: 444-449, 460-465, 466-473, 474-479, 480-485, 532-537, 538-545, 554-561, 532-574, 585-592, 594-598, 602-605, 649-658 and 664; or a polypeptide of option d) comprises an amino acid sequence having at least 65% sequence similarity or identity to a subsequence of at least 15 contiguous amino acid residues of a sequence selected from any of SEQ ID NOs: 444-449, 460-465, 466-473, 474-479, 480-485, 532-537, 538-545, 554-561, 532-574, 585-592, 594-598, 602-605, 649-658 and 664.

[0101] Furthermore, a polypeptide of option a), option b), option c) or option d) may be derived from a polypeptide that co-releases with a major allergen from grass pollen of the genera Phleum, and least from a tree pollen of the genera Quercus and/or betula.

[0102] In some embodiments, the polypeptide of option b) comprises an amino acid sequence with at least 65% similarity or identity to a sequence selected from any of SEQ ID NOs: 413, 416, 432 and 442-443 (NTGA's 24, 29, 56, 91 that starts release within 30 minutes after hydration from both grass and tree pollen (Que a); or a polypeptide of option a) includes at least one amino acid sequence with 0, 1 or 2 mismatches to a sequence selected from any one of SEQ ID NOs: 143-153, 168-175, 262-265 and 397; or a polypeptide of option c) comprises an amino acid sequence having at least 65% sequence similarity or identity to a sequence selected from any one of SEQ ID NOs: 532-537, 554-561, 614-620, 664; or a polypeptide of option d) comprises an amino acid sequence having at least 65% sequence similarity or identity to a subsequence of at least 15 contiguous amino acid residues of a sequence selected from any of SEQ ID NOs: 532-537, 554-561, 614-620 and 664.

[0103] Furthermore, a polypeptide of option a), option b), option c) or option d) may be derived from a polypeptide that co-releases with a major allergen from grass pollen of the genera Phleum, at least from a weed pollen of the genera Ambrosia and from a tree pollen of the genera Quercus and/or Betula.

[0104] In some embodiments, the polypeptide of option b) comprises an amino acid sequence with at least 65% similarity or identity to a sequence selected from any of SEQ ID NOs: 413, 416 and 442-443 (NTGA's 24, 29 and 91 that starts release within 30 minutes after hydration from both grass, weed (Amb a) and tree pollen (Que a) or a polypeptide of option a) includes at least one amino acid sequence with 0, 1 or 2 mismatches to a sequence selected from any one of SEQ ID NOs: 143-153, 168-175 and 397; or a polypeptide of option c) comprises an amino acid sequence having at least 65% sequence similarity or identity to a sequence selected from any one of SEQ ID NOs: 532-537, 554-561 and 664; or a polypeptide of option d) comprises an amino acid sequence having at least 65% sequence similarity or identity to a subsequence of at least 15 contiguous amino acid residues of a sequence selected from any of SEQ ID NOs: 532-537, 554-561 and 664.

[0105] It should be understood that an immunogen of the present invention may contain a PG+ peptides (with less than 1 to 3 mismatches) or a GWT sequence of Table 3. Examples are wild type sequences found in Phleum pollen as set out in Table 2, but other examples are wild type sequences found in other non-grass pollen, for example, a wild type sequence present in, based upon or derived from a pollen of a plant family from any of Asteraceae, Betulaceae, Fagaceae, Oleaceae, or Plantaginaceae, e.g. the plant genera Ambrosia, Artemisia, Helianthus, Alnus, Betula, Carpinus, Castanea, Corylus, Ostrya, Ostryopsis, Fagus, Quercus, Fraxinus, Ligustrum, Lilac, Olea or Plantago. Exemplary polypeptides are set out in Table 4. Thus a polypeptide of option b) may comprise an amino acid sequence having at least 65% similarity or identity to a sequence selected from any of SEQ ID NOs: 665-1109.

[0106] In specific embodiments of the invention, the polypeptide relates to NTGA 6, e.g. a polypeptide of option a) includes at least one amino acid sequence with 0, 1 or 2 mismatches compared to a sequence selected from any one of SEQ ID NOs: 52-74; the polypeptide of option b) comprises an amino acid sequence having at least 65% sequence similarity or identity to SEQ ID NOs: 403 or a homolog thereof in another pollen species, e.g. SEQ ID NOs: 704, 705, 706, 707, 708, 709, 711, 712, 713, 714, 715, 717, 718, 719, 720, 722, 723, 725; the polypeptide of option c) comprises an amino acid sequence having at least 65% sequence similarity or identity to a sequence selected from any one of SEQ ID NOs: 474-479 and polypeptide of option d) comprises an amino acid sequence having at least 65% sequence similarity or identity to a subsequence of at least 15 contiguous amino acid residues of a sequence selected from any of SEQ ID NOs: 474-479.

[0107] In specific embodiments of the invention, the polypeptide relates to NTGA 24, e.g. a polypeptide of option a) includes at least one amino acid sequence with 0, 1 or 2 mismatches compared to a sequence selected from any one of SEQ ID NOs: 143-153; the polypeptide of option b) comprises an amino acid sequence having at least 65% sequence similarity or identity to SEQ ID NOs: 413 or a homolog thereof in another pollen species, e.g. SEQ ID NOs: 808, 809, 810, 811, 812; the polypeptide of option c) comprises an amino acid sequence having at least 65% sequence similarity or identity to a sequence selected from any one of SEQ ID NOs: 532-537 and polypeptide of option d) comprises an amino acid sequence having at least 65% sequence similarity or identity to a subsequence of at least 15 contiguous amino acid residues of a sequence selected from any of SEQ ID NOs: 532-537.

[0108] In specific embodiments of the invention, the polypeptide relates to NTGA 29, e.g. a polypeptide of option a) includes at least one amino acid sequence with 0, 1 or 2 mismatches compared to a sequence selected from any one of SEQ ID NOs: 168-175; the polypeptide of option b) comprises an amino acid sequence having at least 65% sequence similarity or identity to SEQ ID NOs: 416 or a homolog thereof in another pollen species, e.g. SEQ ID NOs: 820, 821, 822, 823, 824, 825; the polypeptide of option c) comprises an amino acid sequence having at least 65% sequence similarity or identity to a sequence selected from any one of SEQ ID NOs: 554-561 and polypeptide of option d) comprises an amino acid sequence having at least 65% sequence similarity or identity to a subsequence of at least 15 contiguous amino acid residues of a sequence selected from any of SEQ ID NOs: 554-561.

[0109] In specific embodiments of the invention, the polypeptide relates to NTGA 39/59, e.g. a polypeptide of option a) includes at least one amino acid sequence with 0, 1 or 2 mismatches compared to a sequence selected from any one of SEQ ID NOs: 223-229, 270-277; the polypeptide of option b) comprises an amino acid sequence having at least 65% sequence similarity or identity to SEQ ID NOs: 420 or a homolog thereof in another pollen species, e.g. SEQ ID NOs: 865, 866, 867, 869, 870, 871; the polypeptide of option c) comprises an amino acid sequence having at least 65% sequence similarity or identity to a sequence selected from any one of SEQ ID NOs: 585-592 and polypeptide of option d) comprises an amino acid sequence having at least 65% sequence similarity or identity to a subsequence of at least 15 contiguous amino acid residues of a sequence selected from any of SEQ ID NOs: 585-592.

[0110] In specific embodiments of the invention, the polypeptide relates to NTGA 86/51, e.g. a polypeptide of option a) includes at least one amino acid sequence with 0, 1 or 2 mismatches compared to a sequence selected from any one of SEQ ID NOs: 357-370, 249-251; the polypeptide of option b) comprises an amino acid sequence having at least 65% sequence similarity or identity to SEQ ID NOs: 438-439 or a homolog thereof in another pollen species, e.g. SEQ ID NOs: 1025, 1026, 1027, 1029, 1030, 1031, 1032, 1033, 1034, 1035, 1036, 1037, 1040, 1041, 1042, 1043, 1044, 1046, 1048, 1049, 1051, 1052, 1053, 1054, 1055, 1056, 1057, 1058, 1059, 1060, 1061, 1062, 1063, 1064, 1065, 1066, 1067, 1068, 1069, 1070, 1071, 1072, 1073, 1074; the polypeptide of option c) comprises an amino acid sequence having at least 65% sequence similarity or identity to a sequence selected from any one of SEQ ID NOs: 602-605, 649-658 and polypeptide of option d) comprises an amino acid sequence having at least 65% sequence similarity or identity to a subsequence of at least 15 contiguous amino acid residues of a sequence selected from any of SEQ ID NOs: 602-605, 649-658.

[0111] In specific embodiments of the invention, the polypeptide relates to NTGA 91, e.g. a polypeptide of option a) includes at least one amino acid sequence with 0, 1 or 2 mismatches compared to a sequence selected from any one of SEQ ID NOs: 397; the polypeptide of option b) comprises an amino acid sequence having at least 65% sequence similarity or identity to SEQ ID NOs: 442-443 or a homolog thereof in another pollen species, e.g. SEQ ID NOs: 1104, 1105, 1106, 1107, 1108, 1109; the polypeptide of option c) comprises an amino acid sequence having at least 65% sequence similarity or identity to a sequence selected from any one of SEQ ID NOs: 664 and polypeptide of option d) comprises an amino acid sequence having at least 65% sequence similarity or identity to a subsequence of at least 15 contiguous amino acid residues of SEQ ID NOs: 664.

[0112] In specific embodiments of the invention, the polypeptide relates to NTGA 1, e.g. a polypeptide of option a) includes at least one amino acid sequence with 0, 1 or 2 mismatches compared to a sequence selected from any one of SEQ ID NOs: 1-7; the polypeptide of option b) comprises an amino acid sequence having at least 65% sequence similarity or identity to SEQ ID NOs: 398 or a homolog thereof in another pollen species, e.g. SEQ ID NOs: 665, 666, 667, 668, 669;the polypeptide of option c) comprises an amino acid sequence having at least 65% sequence similarity or identity to a sequence selected from any one of SEQ ID NOs: 444-449 and polypeptide of option d) comprises an amino acid sequence having at least 65% sequence similarity or identity to a subsequence of at least 15 contiguous amino acid residues of a sequence selected from any of SEQ ID NOs: 444-449.

[0113] As mentioned a polypeptide defined herein may comprise one or more PG+ peptide sequences or a corresponding sequence with 1 or 2 mismatches compared to the PG+ peptide. In certain embodiments, a polypeptide of option a) comprises two or more PG+ peptides, e.g. 2-25 PG+ peptides defined herein, e.g. 3-25, 4-25, 5-25, 6-25, 7-25 PG+ peptides, such as 2-20, 3-20, 4-20, 5-20, 6-20 PG+ peptides or a corresponding sequence with 1 or 2 mismatches compared to the PG+ peptide. For example, a polypeptide of option a) may include one or more immunodominant PG+ peptides, like those recognized by at least 3 subjects in a population of 20 subjects, e.g. a polypeptide of option a) may include one or more sequences selected from any one of SEQ ID NOs: 23, 24, 32, 57, 59, 60, 64, 65, 67, 68, 74, 75, 76, 78, 83, 143, 148, 244, 246, 258, 387, 391, 393 and 397, or a sequence with 0, 1 or 2 mismatches compared to the SEQ ID NOs: 23, 24, 32, 57, 59, 60, 64, 65, 67, 68, 74, 75, 76, 78, 83, 143, 148, 244, 246, 258, 387, 391, 393 and 397.

[0114] Likewise a polypeptide may comprise several stretches of conserved regions of Table 3 from different NTGA's or a subsequence thereof. For example, a polypeptide may comprise. 2-25 conserved regions set out in of Table 1 or 3, e.g. 3-25, 4-25, 5-25, 6-25, 7-25 conserved regions set out in of Table 1 or 3, such as 2-20, 3-20, 4-20, 5-20, 6 conserved regions set out in of Table 1 or 3, for example conserved sequences deriving from immunogens able to start release within 30 minutes after hydration. For example a polypeptide may comprise one or more conserved sequences of NTGAs shown to be released from pollen (Table 6).

[0115] Thus, in some embodiments, a polypeptide of a polypeptide of option c) comprises one or more amino acid sequences selected from any one of SEQ ID NOs: 444-449, 460-465, 466-473, 474-479, 480-485, 532-537, 538-545, 554-561, 532-574, 585-592, 594-598, 602-605, 649-658 and 664 or an amino sequences having at least 65% sequence similarity or identity to the SEQ ID NOs selected, in particularly, a polypeptide of option c) comprises one or more amino acid sequences selected from any one of SEQ ID NOs: 532-537, 554-561, 614-620, 664 or an amino sequences having at least 65% sequence similarity or identity to the SEQ ID NOs selected.

[0116] In still some embodiments, a polypeptide of option d) comprises one or more amino acid sequences having at least 65% sequence similarity or identity to a subsequence of at least 15 contiguous amino acid residues of a sequence selected from any of SEQ ID NOs: 444-449, 460-465, 466-473, 474-479, 480-485, 532-537, 538-545, 554-561, 532-574, 585-592, 594-598, 602-605, 649-658 and 664, in particularly a polypeptide of option d) comprises one or more amino acid sequences having at least 65% sequence similarity or identity to a subsequence of at least 15 contiguous amino acid residues of a sequence selected from any of SEQ ID NOs: 532-537, 554-561, 614-620 and 664.

[0117] In still some embodiments, a polypeptide of option a) may include one or more sequences selected from any one of SEQ ID NOs: 1-7, 34-45, 46-51, 52-74, 75-83, 143-153, 154-161, 168-175, 176-193, 223-229, 270-277, 240-242, 357-370,249-251 and 397, or a sequence with 0, 1 or 2 mismatches compared to the SEQ ID NOs: 1-7, 34-45, 46-51, 52-74, 75-83, 143-153, 154-161, 168-175, 176-193, 223-229, 270-277, 240-242, 357-370,249-251 and 397, in particularly a polypeptide of option a) may include one or more sequences selected from any one of SEQ ID NOs: 143-153, 168-175, 262-265 and 39, or a sequence with 0, 1 or 2 mismatches compared to the SEQ ID NOs: 143-153, 168-175, 262-265 and 397.

[0118] In certain embodiments, the immunogen is a molecule comprising or consisting of a polypeptide, which includes at least one amino acid sequence with 0, 1 or 2 mismatches compared to a sequence selected from any one of SEQ ID NOs: 246, 258 and 315 that are described in both Table 1 and Table 10. Furthermore, an immunogen of the present may contain other peptides set out in Table 10, where it can be demonstrated that the peptide is conserved with a corresponding sequence in a non-grass pollen species. Thus, an immunogen may be a molecule comprising or consisting of a polypeptide, which includes at least one amino acid sequence with 0, 1 or 2 mismatches compared to a sequence selected from any one of SEQ ID NOs: 1110-1177 set out in Table 10. The immunogen may contain at least one T cell epitope, optionally a Th-2 cell epitope.

[0119] In some embodiments, an immunogen of the present invention is an IgE reactive molecule, e.g. able to bind to IgE antibodies specific for the immunogen. However, IgE reactivity towards an immunogen of the invention may only be conferred by a low fraction of an allergic population. Thus, an immunogen of the invention do not fall under the usual definitions of a major allergen. In some embodiments, the immunogen is able to react with, bind to or induce IgG antibodies in a subject, at least in detectable levels. In still other embodiments, the immunogen does not react with, bind to or induce IgG antibodies, at least in detectable levels. As demonstrated herein, an immunogen of the invention seems to be less immunogenic than a major allergen (FIG. 2), but still able to induce tolerance towards an unrelated immunogen (i.e. pollen allergen).

[0120] As mentioned, a subject eligible for being treated with an immunogen of the invention may also be sensitized to a grass pollen allergen, for example a grass pollen allergen of a plant genus selected from any of Anthoxanthum, Conydon, Phleum and Poa.

[0121] As disclosed herein, immunogens of the present invention may be found in various pollen families and share high identity and similarity with a wild type immunogen in non-grass pollen families and in other grass pollen families than of the genus Phleum. For example, a polypeptide of option b) comprises an amino acid sequence having at least 70% similarity or identity to a sequence selected from any one of SEQ ID NOs: 398-443, for example at least 75%, 80%, 85%, 90%, 91%, 92%, 93%, 94%, 95%, 96%, 97%, 98%, 99% similarity or identity. Examples on wild type immunogens with high identity and similarity to the wild type NTGA's are shown in Table 4. Here is disclosed wild type proteins found in other pollen species and which shares PG+ peptides or GWT regions with the NTGA's disclosed herein.

[0122] For example, wild type sequences comparable to NTGA 6 are found in at least Amb a, Amb p, Ant o, Bet v, Cyn d, Fra e, Lol p, Ole e, Pla I, Poa p, and Que a and comprises SEQ ID NOs: 704, 705, 706, 707, 708, 709, 710, 711, 712, 713, 714, 715, 716, 717, 718, 719, 720, 721, 722, 723, 724 and 725.

[0123] It follows that a polypeptide of option b) may comprise an amino acid sequence having at least 70% similarity or identity to a sequence selected from any one of SEQ ID NOs: 665-1109, for example at least 75%, 80%, 85%, 90%, 91%, 92%, 93%, 94%, 95%, 96%, 97%, 98%, 99% similarity or identity.

[0124] Furthermore, a polypeptide of option c) comprises an amino acid sequence having at least 70% similarity or identity to a sequence selected from any one of GWT sequences of Table 3 (SEQ ID NOs: 444-664), for example at least 75%, 80%, 85%, 90%, 91%, 92%, 93%, 94%, 95%, 96%, 97%, 98%, 99% similarity or identity. In certain embodiments thereof, it may be considered to utilize a polypeptide comprising an amino acid sequence having at least 85% similarity or identity to a sequence selected from any one of GWT sequences of Table 2. Furthermore, a polypeptide of option d) comprises an amino acid sequence having at least 70% sequence similarity or identity to a subsequence of at least 13, 14, 15 or 16 contiguous amino acid residues of a sequence selected from any of SEQ ID NOs: 444-664, for example at least 75%, 80%, 85%, 90%, 91%, 92%, 93%, 94%, 95%, 96%, 97%, 98%, 99% sequence similarity or identity to a subsequence of at least 13, 14, 15, or 16 contiguous amino acid residues of a sequence selected from any of SEQ ID NOs: 443-664. In certain embodiments thereof, it may be considered to utilize a polypeptide comprising an amino acid sequence having at least 85% sequence similarity or identity to a subsequence of at least 13, 14, 15 or 16 contiguous amino acid residues of any one GWT sequences of Table 2.

[0125] A subsequence may contain a T cell epitope, such as a Th2 cell epitope. A subsequence or a polypeptide described herein may have HLA Class II binding properties. HLA Class II binding can be predicted using NetMHClIpan-3.0 tool (Karosiene, Edita, Michael Rasmussen, Thomas Blicher, Ole Lund, Soren Buus, and Morten Nielsen. “NetMHClIpan-3.0, a Common Pan-specific MHC Class II Prediction Method Including All Three Human MHC Class II Isotypes, HLA-DR, HLA-DP and HLA-DQ.” Immunogenetics) available at the internet site <URL: http://www.cbs.dtu.dk/services/NetMHClIpan-3.0>.

[0126] A polypeptide of option a) may have different lengths according to the desirable use, for example of about 15-800 or more amino acid residues in length, for example 15-750, 15-700, 15-650, 15-600, 15-500 or more amino acid residues, for example 15-20, 15-25, 15-30, 20-25, 25-30, 30-35, 35-40, 45-50, 50-60, 60-70, 70-80, 90-100, 100-125, 125-150, 150-175, 175-200, 200-250, 250-300, 300-350, 350-400, 400-450, 450-500, 500-550, 550-600, 600-650, 650-700, 700-800 or more amino acid residues. One may consider utilizing short linear peptides, which when administered to a subject need not to be processed by an antigen presenting cells to interact with a relevant T cell receptor, but rather freely loaded onto a MHC class II molecule to interact with the relevant T cell receptor. Thus, in some embodiments, a polypeptide of option a) and a polypeptide of option d) has a length in the range of 15 to 30 amino acid residues, for example 15 to 25 amino acid residues. In other embodiments, a polypeptide of option a) is a longer polypeptide which comprises a secondary or tertiary structure, e.g. folded. Thus, in other embodiments, a polypeptide of option a) has a length in the range of 30 to 500 amino acid residues or more.

[0127] Polypeptides of option b) or c) may have the same length as the wild type sequence of the NTGA of Table 2, GWT sequence of Table 3, or the homolog of Table 4, respectively or may be shorter or longer. It is considered that the length of the amino acid sequence of a polypeptide of option b) is no more than 800 amino acid residues, for example no more than 750, 700, 650, 600, 550, 500 or 450 amino acid residues. Also it may be considered that the length of a polypeptide of option b) has an amino acid sequence length that is 80% to 120% of the length of any one of SEQ ID NOs: 398-443 and a polypeptide of option d) has an amino acid sequence length that is 80% to 120% of the length of any one of SEQ ID NOs: 444-664.

[0128] The term “identity” and “identical” and grammatical variations thereof, as used herein, mean that two or more referenced entities are the same (e.g., amino acid sequences). Thus, where two polypeptides are identical, they have the same amino acid sequence. The identity can be over a defined area (region or domain) of the sequence, e.g. over the sequence length of a sequence disclosed in Tables 1, 2, 3 or 4 or over a portion thereof e.g. at least 15 contiguous amino acid residues. Moreover, the identity can be over the length of the sequence overlapping the two polypeptides, when aligned with best fit with gaps permitted.

[0129] For example, to determine whether a polypeptide has at least 65% similarity or identity to a sequence set out in Tables 2, 3 and 4, the polypeptide may be aligned with a sequence of Table 2, 3 or 4 and the percent identity be calculated with reference to a sequence of Table 2, 3 and 4.

[0130] Identity can be determined by comparing each position in aligned sequences. A degree of identity between amino acid sequences is a function of the number of identical or matching amino acids at positions shared by the sequences, i.e. over a specified region. Optimal alignment of sequences for comparisons of identity may be conducted using a variety of algorithms, as are known in the art, including the Clustal Omega program available at http://www.ebi.ac.uk/Tools/msa/clustalo/, the local homology algorithm of Smith and Waterman, 1981, Adv. Appl. Math 2: 482, the homology alignment algorithm of Needleman and Wunsch, 1970, J. Mol. Biol. 48:443, the search for similarity method of Pearson and Lipman, 1988, Proc. Natl. Acad. Sci. USA 85: 2444, and the computerized implementations of these algorithms (such as GAP, BESTFIT, FASTA and TFASTA in the Wisconsin Genetics

[0131] Software Package, Genetics Computer Group, Madison, WI, U.S.A.). Sequence identity may also be determined using the BLAST algorithm, described in Altschul et al., 1990, J. Mol. Biol. 215:403-10 (using the published default settings). Software for performing BLAST analysis may be available through the National Center for Biotechnology Information (through the internet at htt://www.ncbi.nlm.nih.gov/). Such algorithms that calculate percent sequence identity (homology) generally account for sequence gaps and mismatches over the comparison region or area. For example, a BLAST (e.g., BLAST 2.0) search algorithm (see, e.g., Altschul et al., J. Mol. Biol. 215:403 (1990), publicly available through NCBI) has exemplary search parameters as follows: Mismatch -2; gap open 5; gap extension 2. For polypeptide sequence comparisons, a BLASTP algorithm is typically used in combination with a scoring matrix, such as PAM100, PAM 250, BLOSUM 62 or BLOSUM 50. FASTA (e.g., FASTA2 and FASTA3) and SSEARCH sequence comparison programs are also used to quantitate the extent of identity (Pearson et al., Proc. Natl. Acad. Sci. USA 85:2444 (1988); Pearson, Methods Mol Biol. 132:185 (2000); and Smith et al., J. Mol. Biol. 147:195 (1981)). Programs for quantitating protein structural similarity using Delaunay-based topological mapping have also been developed (Bostick et al., Biochem Biophys Res Commun. 304:320 (2003)).

[0132] A polypeptide sequence is a “homologue” of, or is “homologous” to, another sequence if the two sequences have substantial identity over a specified region and a functional activity of the sequences is preserved or conserved, at least in part (as used herein, the term ‘homologous’ does not infer nor exclude evolutionary relatedness).

[0133] Examples of “homologous polypeptides” of the invention include polypeptides found in non-Timothy grass pollen and with high identity to the NTGA's disclosed in Table 2. For example, a homologous polypeptide may be found in pollen of plant families selected among Asteraceae, Betulaceae, Fagaceae, Oleaceae, or Plantaginaceae, e.g. the plant genera Ambrosia, Artemisia, Helianthus, Alnus, Betula, Carpinus, Castanea, Corylus, Ostrya, Ostryopsis, Fagus, Quercus, Fraxinus, Ligustrum, Lilac, Olea or Plantago.

[0134] Two polypeptide sequences are considered to be substantially identical if, when optimally aligned (with gaps permitted), they share at least about 65%, 70%, 75%, 80%, 85%, 90%, 95%, 96%, 97%, 98%, 99%, etc. identify over a specific region), for example, over all or a part of any amino acid sequence in Tables 1, 2, and 3, or if the sequences share defined functional motifs (e.g., epitopes). In particular aspects, the length of the sequence sharing the percent identity is at least 15, 16, 17, 18, 19, 20, etc. contiguous amino acids, e.g. more than 25, 30, 35, 40, 45 or 50 or more contiguous amino acids, including the entire length of a reference sequence of Tables 2, 3 or 4.

[0135] An “unrelated” or “non-homologous” sequence is considered to share less than 30% identity. More particularly, it may shares less than about 25% identity, with a polypeptide of the invention over a specified region of homology.

[0136] An amino acid sequence set out in any of Tables 2, 3 and 4 may contain modifications resulting in greater or less activity or function, such as ability to elicit, stimulate, induce, promote, increase, enhance, activate, modulate, inhibit, decreases, suppress, or reduce an immune response (e.g. a T cell response) or elicit, stimulate, induce, promote, increase or enhance immunological tolerance (desensitize) to an immunogen of the invention or a pollen allergen.

[0137] A modification includes deletions, including truncations and fragments; insertions and additions, substitutions, for example conservative substitutions, site-directed mutants and allelic variants.

[0138] Non-limiting examples of modifications include one or more amino acid substitutions (e.g., 1, 2, 3, 4, 5, 6, 7, 8, 9, 10, 11, 12, 13, 14, 15, 16, 17, 18, 19, 20-25, 25-30, 30-50, 50-100 or more residues), additions and insertions (e.g., 1, 2, 3, 4, 5, 6, 7, 8, 9, 10, 11, 12, 13, 14, 15 or more residues) and deletions (e.g., 1, 2, 3, 4, 5, 6, 7, 8, 9, 10, 11, 12, 13, 14, 15, 16, 17, 18, 19, 20-25, 25-30, 30-50, 50-100 or more) of a sequence set out in Tables 1, 2, 3 and 4.

[0139] The term “similarity” and “similar” and grammatical variations thereof, as used herein, mean that two or more referenced amino acid sequences contains a limited number of conservative amino acid substitutions of the amino acid sequence. A variety of criteria can be used to indicate whether amino acids at a particular position in a polypeptide are similar. In making such changes, substitutions of like amino acid residues can be made on the basis of relative similarity of side-chain substituents, for example, their size, charge, hydrophobicity, hydrophilicity, and the like, and such substitutions may be assayed for their effect on the function of the peptide by routine testing.

[0140] A “conservative substitution” is the replacement of one amino acid by a biologically, chemically or structurally similar residue. Biologically similar means that the substitution does not destroy a biological activity. Structurally similar means that the amino acids have side chains with similar length, such as alanine, glycine and serine, or a similar size. Chemical similarity means that the residues have the same charge, or are both hydrophilic or hydrophobic. For example, a conservative amino acid substitution is one in which an amino acid residue is replaced with an amino acid residue having a similar side chain, which include amino acids with basic side chains (e.g., lysine, arginine, histidine); acidic side chains (e.g., aspartic acid, glutamic acid); uncharged polar side chains (e.g., glycine, asparagine, glutamine, serine, threonine, tyrosine, cysteine, histidine); nonpolar side chains (e.g., alanine, valine, leucine, isoleucine, proline, phenylalanine, methionine, tryptophan); beta-branched side chains (e.g., threonine, valine, isoleucine), and aromatic side chains (e.g., tyrosine, phenylalanine, tryptophan). Particular examples include the substitution of one hydrophobic residue, such as isoleucine, valine, leucine or methionine for another, or the substitution of one polar residue for another, such as the substitution of arginine for lysine, glutamic for aspartic acids, or glutamine for asparagine, serine for threonine, and the like. Proline, which is considered more difficult to classify, shares properties with amino acids that have aliphatic side chains (e.g., Leu, Val, Ile, and Ala). In certain circumstances, substitution of glutamine for glutamic acid or asparagine for aspartic acid may be considered a similar substitution in that glutamine and asparagine are amide derivatives of glutamic acid and aspartic acid, respectively. Conservative changes can also include the substitution of a chemically derivatized moiety for a non-derivatized residue, for example, by reaction of a functional side group of an amino acid. Variants and derivatives of polypeptides include forms having a limited number of one or more substituted residues.

[0141] As mentioned, a polypeptide of option a), b), c) and d) may be longer than the reference sequence set out in Tables 1, 2, 3 and 4.

[0142] An addition can be one or more additional amino acid residues. For example, a polypeptide of option a) may contain amino acid residues in addition to the 15 amino acid residues of the PG+ peptide, and optionally, the additional amino acid residues may be identical to those present in the wild type NTGA from which the PG+ peptide derives from. Thus, in some embodiments, the polypeptide of option a) comprises one or more amino acid residues in addition to the 15 contiguous amino acids (PG+ peptide) set out in Table 1, wherein the additional amino acid residue(s) is/are selected from an amino acid residue or an amino acid sequence within the wild type protein of which the PG+ peptide is a part of (e.g. wild type sequences of Tables 2 or 4 or a GWT sequence of Table 3). For example, the wild type amino acid residue or wild type amino acid sequence to be added may be adjacent to, subtended, comprised within, overlapping with or is a part of the PG+ peptide sequence, when present in its natural biological context within the wild type protein. An illustrative example is a PG+ peptide of NTGA 6 as set out in Table 1 that may be extended with amino acid residues from NTGA 6 set out in Table 2, or a homolog thereof set out in Table 3, such as amino acid residues adjacent to the PG+ sequence when aligned with NTGA 6 or the homolog thereof.

[0143] Likewise, a polypeptide of option c) may contain additional amino acid residues in addition to the GWT sequence set out in Table 3. Thus, a polypeptide of option c) may comprise one or more amino acid residues in addition to the GWT sequence set out in Table 3, wherein the additional amino acid residue(s) is/are selected from an amino acid residue or an amino acid sequence within the wild type protein of which the GWT sequence is a part of (e.g. a wild type protein of Tables 2 or 4). An illustrative example is a GWT sequence of NTGA 6 as set out in Table 2 that may be extended with amino acid residues from NTGA 6 set out in Table 2, or a homolog thereof set out in Table 3, such as amino acid residues adjacent to the GWT sequence when aligned with the corresponding wild type protein, NTGA 6 or a homolog thereof of Table 4.

[0144] The additional amino acid residues may be added to the N- and/or C- terminal end of a sequence set out in Tables 1, 2, 3 and 4, such as additional amino acids selected from amino acids flanking the N- and/or C- terminal ends when sequence is aligned with the source protein it is present in, based upon or derived from. Thus, where a sequence derives from NTGA 6, the additional amino acids may be the amino acids flanking the N- and/or C-terminal ends of the sequence when aligned to NTGA 6.

[0145] In one embodiment, a polypeptide of option a), b), c) or d) is derivatized. Specific non-limiting examples of derivatization are covalent or non-covalent attachment of another molecule. Specific examples include glycosylation, acetylation, phosphorylation, amidation, formylation, ubiquitination, and derivatization by protecting/blocking groups and any of numerous chemical modifications.

[0146] In particular embodiments, a derivative is a fusion (chimeric) sequence, an amino acid sequence having one or more molecules not normally present in the wild type sequence covalently attached to the sequence. The term “chimeric” and grammatical variations thereof, when used in reference to a sequence, means that the sequence contains one or more portions that are derived from, obtained or isolated from, or based upon other physical or chemical entities. For example, a chimera of two or more different polypeptides may have one part a polypeptide, and a second part of the chimera may be from a different sequence, or unrelated protein sequence.

[0147] Another particular example of a derivatized polypeptide is one in which a second heterologous sequence, i.e., heterologous functional domain is attached (covalent or non-covalent binding) that confers a distinct or complementary function. Heterologous functional domains are not restricted to amino acid residues. Thus, a heterologous functional domain can consist of any of a variety of different types of small or large functional moieties. Such moieties include nucleic acid, peptide, carbohydrate, lipid or small organic compounds, such as a drug (e.g., an antiviral), a metal (gold, silver), and radioisotope. For example, a tag such as T7 or polyhistidine can be attached in order to facilitate purification or detection of a protein, peptide, etc. For example, a 6-HIS tag may be added to the C- or N-terminal end of a polypeptide of option a), b), c) or d), e.g. the 6-HIS sequence GHHHHHHGSGMLDI, which optionally may remain in the immunogen when administered to a subject. Thus, a polypeptide linked to a Tag containing histidines may easily be purified by use of a HIS tag affinity column).

[0148] Accordingly, there are provided polypeptides linked to a heterologous domain, wherein the heterologous functional domain confers a distinct function on the polypeptide.

[0149] In some embodiments, the polypeptide is derivatized for example to improve solubility, stability, bioavailability or biological activity. For example, tagged polypeptides and fusion proteins; and modifications, including peptides having one or more non-amino acyl groups (q.v., sugar, lipid, etc.) covalently linked to the polypeptide and post-translational modifications.

[0150] Linkers, such as amino acid or peptidomimetic sequences may be inserted between the sequence and the addition (e.g., heterologous functional domain) so that the two entities maintain, at least in part, a distinct function or activity. Linkers may have one or more properties that include a flexible conformation, an inability to form an ordered secondary structure or a hydrophobic or charged character, which could promote or interact with either domain. Amino acids typically found in flexible protein regions include Gly, Asn and Ser. Other near neutral amino acids, such as Thr and Ala, may also be used in the linker sequence. The length of the linker sequence may vary without significantly affecting a function or activity of the fusion protein (see, e.g., U.S. Pat. No. 6,087,329). Linkers further include chemical moieties and conjugating agents, such as sulfo-succinimidyl derivatives (sulfo-SMCC, sulfo-SMPB), disuccinimidyl suberate (DSS), disuccinimidyl glutarate (DSG) and disuccinimidyl tartrate (DST).

[0151] Further non-limiting examples of derivatives are detectable labels. Thus, in another embodiment, the invention provides polypeptides that are detectably labeled. Specific examples of detectable labels include fluorophores, chromophores, radioactive isotopes (e.g., S³⁵, P³², I¹²⁵), electron-dense reagents, enzymes, ligands and receptors. Enzymes are typically detected by their activity. For example, horseradish peroxidase is usually detected by its ability to convert a substrate such as 3,3-′,5,5-′-tetramethylbenzidine (TMB) to a blue pigment, which can be quantified.

[0152] Modified polypeptides also include one or more D-amino acids substituted for L-amino acids (and mixtures thereof), structural and functional analogues, for example, peptidomimetics having synthetic or non-natural amino acids or amino acid analogues and derivatized forms. Modifications include cyclic structures such as an end-to-end amide bond between the amino and carboxy-terminus of the molecule or intra- or inter-molecular disulfide bond.

[0153] A polypeptide of the invention may be modified to avoid oxidation, improve solubility in aqueous solution, avoid aggregation, overcome synthesis problems etc. For example the polypeptide amino acid sequence may include the following modifications:
[0154] a glutamate residue present at the N- terminus of a peptide replaced with pyroglutamate;
[0155] addition of one or more lysine amino residue(s) at the N- or C-terminus of the peptide;
[0156] addition of one or more arginine amino residue(s) at the N- or C-terminus of the peptide;
[0157] one or more modifications selected from the following: (a) any cysteine residues in the wild type sequence of the peptide are replaced with serine or 2-aminobutyric acid; (b) hydrophobic residues in the up to three amino acids at the N or C terminus of the wild type sequence of the peptide are deleted; (c) any two consecutive amino acids comprising the sequence Asp-Gly in the up to four amino acids at the N or C terminus of the wild type sequence of the peptide are deleted; and/or (d) one or more positively charged residues are added at the N- and/or C-terminus.

[0158] In particular, a polypeptide may comprise one, two or more lysine or arginine amino acid residue(s) added to the N- or C-terminus of the peptide to be modified, which may improve the aqueous solubility.

[0159] In particular, a polypeptide of the invention may comprise one or more cysteine residues that are substituted with amino acid residues less prone to oxidation, e.g. serine or arginine.

[0160] Polypeptides may be provided in the form of a salt, for example as a pharmaceutically acceptable and/or a physiologically acceptable salt. For example, the salt may be an acid addition salt with an inorganic acid, an acid addition salt with an organic acid, a salt with a basic inorganic acid, a salt with a basic organic acid, a salt with an acidic or basic amino acid or a mixture thereof. In particular embodiments of the invention a salt, such as a pharmaceutically acceptable salt, is an acetate salt.

[0161] The invention provides polypeptides and molecules in isolated and/or purified form.

[0162] The term “isolated,” when used as a modifier of a composition, means that the compositions are made by the hand of man or are separated, completely or at least in part, from their naturally occurring in vivo environment. Generally, isolated compositions are substantially free of one or more materials with which they normally associate with in nature, for example, one or more protein, nucleic acid, lipid, carbohydrate, cell membrane. The term “isolated” does not exclude alternative physical forms of the composition, such as fusions/chimeras, multimers/oligomers, modifications (e.g., phosphorylation, glycosylation, lipidation) or derivatized forms, or forms expressed in host cells produced by the hand of man.

[0163] An “isolated” composition (e.g. polypeptides or molecules as defined herein) can also be “substantially pure” or “purified” when free of most or all of the materials with which it typically associates with in nature. Thus, an isolated polypeptide that also is substantially pure or purified does not include polypeptides or polynucleotides present among millions of other sequences, such as polypeptide of an peptide library or nucleic acids in a genomic or cDNA library, for example.

[0164] A “substantially pure” or “purified” composition can be combined with one or more other molecules. Thus, “substantially pure” or “purified” does not exclude combinations of compositions, such as combinations of polypeptides other antigens, agents, drugs or therapies.

[0165] Polypeptides can be prepared recombinantly, chemically synthesized, isolated from a biological material or source, and optionally modified, or any combination thereof. A biological material or source would include an organism that produced or possessed any polypeptide or molecule set forth herein. A biological material or source may further refer to a preparation in which the morphological integrity or physical state has been altered, modified or disrupted, for example, by dissection, dissociation, solubilization, fractionation, homogenization, biochemical or chemical extraction, pulverization, lyophilization, sonication or any other means of manipulating or processing a biological source or material. Polypeptides, such as immunogenic molecules disclosed herein may be modified by substituting, deleting or adding one or more amino acid residues in the amino acid sequence and screening for biological activity, for example eliciting an immune response. A skilled person will understand how to make such derivatives or variants, using standard molecular biology techniques and methods, described for example in Sambrook et al. (2001) Molecular Cloning: a Laboratory Manual, 3^{rd} ed., Cold Spring Harbour Laboratory Press).

[0166] Polypeptides and molecules that are provided herein can be employed in various methods and uses. Such methods and uses include, for example, administration in vitro and in vivo of one or more polypeptides or molecules thereof. The methods and uses provided include methods and uses of modulating an immune response (e.g. an allergic immune response), including, among others, methods and uses of relieving an immune response (e.g. allergic immune response), protecting and treating subjects against a disorder, disease (e.g. allergic disease); and methods and uses of providing immunotherapy, such as specific immunotherapy against an allergic immune response, e.g. allergy.

[0167] In particular embodiments, methods and uses include administration or delivery of an immunogen provided herein to modulate an immune response in a subject, including, for example, modulating an immune response to a pollen allergen or the immunogen.

[0168] As used herein, the term “modulate,” means an alteration or effect on the term modified. In certain embodiments, modulating involves decreasing, reducing, inhibiting, suppressing, relieving an immune response in a subject to an allergen or an immunogen provided herein. In other embodiments, modulating involves eliciting, stimulating, inducing, promoting, increasing or enhancing an immune response in a subject to an antigen or allergen. Thus, where the term “modulate” is used to modify the term “immune response against an allergen in a subject” this means that the immune response in the subject to the allergen or immunogen is altered or affected (e.g., decreased, reduced, inhibited, suppressed, limited, controlled, prevented, elicited, promoted, stimulated, increased, induced, enhanced, etc.

[0169] Methods and uses of modulating an immune response against an allergen or immunogen as described herein may be used to provide a subject with protection against an allergic immune response or immune reaction to the allergen or immunogen, or symptoms or complications caused by or associated with the allergen or immunogen. Accordingly, in other embodiments, methods and uses include administering an immunogen of the invention to protect or treat a subject against an allergic immune response, or one or more symptoms caused by or associated with an allergen. In still other embodiments, methods and uses include administering or delivering an immunogen of the invention to elicit, stimulate, induce, promote, increase or enhance immunological tolerance of a subject to an allergen or immunogen disclosed herein.

[0170] In various embodiments, there are provided methods and uses of providing a subject with protection against an allergic immune response, or one or more symptoms caused by or associated with an allergen or immunogen disclosed herein. In various aspects, a method or use includes administering to the subject an amount of an immunogen of the invention sufficient to provide the subject with protection against the allergic immune response, or symptoms caused by or associated with the allergen or immunogen.

[0171] Methods and uses of the invention include providing a subject with protection against an allergen or an immunogen, or symptoms caused by or associated with the subject's exposure to the allergen or immunogen, for example, vaccinating the subject to protect against an allergic immune response to the allergen or immunogen, for example with an immunogen provided herein. In certain embodiments, methods and uses include protecting the subject against an allergic immune response by inducing tolerance of the subject (desensitizing) to the allergen, and optionally to the immunogen.

[0172] As used herein, the terms “protection,” “protect” and grammatical variations thereof, when used in reference to an allergic immune response or symptoms caused by or associated with the exposure to allergen, means preventing an allergic immune response or symptoms caused by or associated with the exposure to the allergen, or reducing or decreasing susceptibility to an allergic immune response or one or more symptoms caused by or associated with the exposure to the allergen.

[0173] An allergic immune response includes but is not limited to an allergic reaction, hypersensitivity, an inflammatory response or inflammation. In certain embodiments allergic immune response may involve one or more of cell infiltration, production of antibodies, production of cytokines, lymphokines, chemokines, interferons and interleukins, cell growth and maturation factors (e.g., differentiation factors), cell proliferation, cell differentiation, cell accumulation or migration (chemotaxis) and cell, tissue or organ damage or remodeling. In particular aspects, an allergic immune response may include allergic rhinitis; atopic dermatitis; allergic conjunctivitis and asthma. Allergic responses can occur systemically, or locally in any region, organ, tissue, or cell. In particular aspects, an allergic immune response occurs in the skin, the upper respiratory tract, the lower respiratory tract, pancreas, thymus, kidney, liver, spleen, muscle, nervous system, skeletal joints, eye, mucosal tissue, gut or bowel.

[0174] Methods and uses herein include relieving, including treating, a subject for an allergic immune response, or one or more symptoms caused by or associated with an allergen. Such methods and uses include administering to a subject an amount of an immunogen sufficient to relieve, such as treat, the subject for the allergic immune response, or one or more symptoms caused by or associated with the allergen.

[0175] Methods and uses of the invention include treating or administering a subject previously exposed to an allergen or immunogen. Thus, in certain embodiments, methods and uses are for treating or protecting a subject from an allergic immune response, or one or more symptoms caused by or associated with secondary or subsequent exposure to an allergen or an immunogen.

[0176] Immunogens described herein may elicit, stimulate, induce, promote, increase or enhance immunological tolerance to an allergen and/or to the immunogen. Methods and uses of the invention therefore further include inducing immunological tolerance of a subject to an allergen or the immunogen itself. Thus, for example, immunogens described herein can be effective in relieving, such as treating an allergic immune response, including but not limited to an allergic immune response following a secondary or subsequent exposure of a subject to an allergen. In one embodiment, a method or use includes administering to the subject an amount of an immunogen sufficient to induce tolerance in the subject to the allergen or immunogen itself. In particular aspects, the immunological tolerance elicited, stimulated, induced, promoted, increased or enhanced may involve modulation of T cell activity, including but not limited to CD4+ T cells, CD8+ T cells, Th1 cells, Th2 cells and regulatory T cells. For example, immunological tolerance elicited, stimulated, induced, promoted, increased or enhanced from administration of the immunogen, may involve modulation of the production or activity of pro-inflammatory or anti-inflammatory cytokines produced by T cells.

[0177] In additional embodiments, a method or use of inducing immunological tolerance in a subject to an allergen includes a reduction in occurrence, frequency, severity, progression, or duration of physiological conditions, disorders, illnesses, diseases, symptoms or complications caused by or associated an allergic response to the allergen in the subject. Thus, in certain embodiments, inducing immunological tolerance can protect a subject against or treat a subject for an allergic immune response, or one or more symptoms caused by or associated with an allergen or the immunogen.

[0178] Methods and uses of the invention include treating a subject via immunotherapy, including specific immunotherapy. In one embodiment, a method or use includes administering to the subject an amount of an immunogen described herein. In one aspect, an immunogen administered to a subject during specific immunotherapy to treat the subject is the same immunogen to which the subject has been sensitized or is hypersensitive (e.g., allergic). In another non-limiting aspect, an immunogen is administered to a subject to treat the subject to a different immunogen, e.g. a pollen allergen to which the subject has been sensitized or is hypersensitive (e.g., allergic). Thus, the immunotherapeutic mechanism may involve bystander suppression of an allergic immune response caused by a pollen allergen by administering an unrelated immunogen, e.g. an immunogen disclosed herein.

[0179] As described herein, immunogens include T cell epitopes, such as Th2 cell epitopes. In methods and uses herein, the subject to be treated has a specific T-cell response to the immunogen before administering the first dose.

[0180] Accordingly, methods and uses of the invention include administering an amount of an immunogen (e.g., a T cell epitope-containing immunogen) to a subject sufficient to provide the subject with protection against an allergic immune response, or one or more symptoms caused by or associated with an allergen. In another embodiment, a method includes administering an amount of an immunogen (e.g., a T cell epitope-containing immunogen) to a subject sufficient to relieve, e.g. treat, vaccinate or immunize the subject against an allergic immune response, or one or more symptoms caused by or associated with an allergen.

[0181] The specific T-cell response may be monitored by determining by way of contacting a sample of PBMCs obtained from the subject with the immunogens and measuring the IL-5 secretion or IL-5 mRNA gene expression in response to the immunogen.

[0182] In accordance with the invention, methods and uses of modulating anti-allergen activity of T cells, including but not limited to CD8⁺ T cells, CD4⁺ T cells, Th1 cells or Th2 cells, in a subject are provided. In one embodiment, a method or use includes administering to a subject an amount of a polypeptide described herein or derivative thereof including an immunogenic molecule described herein, such as a T cell epitope, sufficient to modulate Th2 cell activity in the subject.

[0183] In certain embodiments, two or more immunogens may be administered to a subject, e.g. may be administered as a combination composition, or administered separately, such as concurrently or in series or sequentially. For example, methods and uses described herein comprise administration separately or as a combination: at least 2-25 polypeptides defined herein, or separately or as a combination of 3-25, 4-25, 5-25, 6-25, 7-25 polypeptides defined herein, or separately or as a combination of 2-20, 3-20, 4-20, 5-20, 6-20 defined herein, or separately or as a combination of 2-12, 3-12, 4-12, 5-12, 6-12, 7-12 polypeptides defined herein, or separately or as a combination of 2-10, 3-10, 4-10, 5-10, 6-10, 7-10 polypeptides defined herein.

[0184] For example, a there may be administered to a subject, e.g. as a combination composition, one or more immunodominant PG+ peptides, like those recognized by at least 3 subjects in a population of 20 subjects, e.g. composition comprising one more polypeptides of option a), wherein each polypeptide of option a) may independently include one or more sequences selected from any one of SEQ ID NOs: 23, 24, 32, 57, 59, 60, 64, 65, 67, 68, 74, 75, 76, 78, 83, 143, 148, 244, 246, 258, 387, 391, 393 and 397, or a sequence with 0, 1 or 2 mismatches compared to the SEQ ID NOs: 23, 24, 32, 57, 59, 60, 64, 65, 67, 68, 74, 75, 76, 78, 83, 143, 148, 244, 246, 258, 387, 391, 393 and 397.

[0185] Compositions may comprise one or more polypeptides, comprising a conserved region of Table 3 from different NTGA's or a subsequence thereof. For example, a composition may comprise 2-25 polypeptides of option d), wherein each option d) polypeptide independently comprises one or more amino acid sequences having at least 65% sequence similarity or identity to a subsequence of at least 15 contiguous amino acid residues of a sequence selected from any of SEQ ID NOs: 444-449, 460-465, 466-473, 474-479, 480-485, 532-537, 538-545, 554-561, 532-574, 585-592, 594-598, 602-605, 649-658 and 664, in particularly, wherein a polypeptide of option d) comprises one or more amino acid sequences having at least 65% sequence similarity or identity to a subsequence of at least 15 contiguous amino acid residues of a sequence selected from any of SEQ ID NOs: 532-537, 554-561, 614-620 and 664.

[0186] Compositions may comprise one or more polypeptides of option a), wherein each polypeptide of option a) may include one or more sequences selected from any one of SEQ ID NOs: 1-7, 34-45, 46-51, 52-74, 75-83, 143-153, 154-161, 168-175, 176-193, 223-229, 270-277, 240-242, 357-370,249-251 and 397, or a sequence with 0, 1 or 2 mismatches compared to the SEQ ID NOs: 1-7, 34-45, 46-51, 52-74, 75-83, 143-153, 154-161, 168-175, 176-193, 223-229, 270-277, 240-242, 357-370,249-251 and 397, in particular a polypeptide of option a) may include one or more sequences selected from any one of SEQ ID NOs: 143-153, 168-175, 262-265 and 39, or a sequence with 0, 1 or 2 mismatches compared to the SEQ ID NOs: 143-153, 168-175, 262-265 and 397.

[0187] Methods and uses of the invention therefore include any therapeutic or beneficial effect. In various methods embodiments, an allergic immune response, or one or more symptoms caused by or associated with an allergen is reduced, decreased, inhibited, limited, delayed or prevented. Methods and uses of the invention moreover include reducing, decreasing, inhibiting, delaying or preventing onset, progression, frequency, duration, severity, probability or susceptibility of one or more adverse symptoms, disorders, illnesses, diseases or complications caused by or associated with an antigen/allergen. In further various particular embodiments, methods and uses include improving, accelerating, facilitating, enhancing, augmenting, or hastening recovery of a subject from an allergic immune response, or one or more physiological conditions, symptoms or complications caused by or associated with an antigen/allergen. In yet additional various embodiments, methods and uses include stabilizing an allergic immune response, or one or more physiological conditions, symptoms or complications caused by or associated with an antigen/allergen.

[0188] A therapeutic or beneficial effect is therefore any objective or subjective measurable or detectable improvement or benefit provided to a particular subject. A therapeutic or beneficial effect can but need not be complete ablation of all or any allergic immune response, or one or more symptoms caused by or associated with an allergen. Thus, a satisfactory clinical endpoint is achieved when there is an incremental improvement or a partial reduction in an allergic immune response, or one or more symptoms caused by or associated with an allergen, or an inhibition, decrease, reduction, suppression, prevention, limit or control of worsening or progression of an allergic immune response, or one or more symptoms caused by or associated with an allergen, over a short or long duration (hours, days, weeks, months, etc.).

[0189] A therapeutic or beneficial effect also includes reducing or eliminating the need, dosage frequency or amount of a second therapeutic protocol or active such as another drug or other agent (e.g., anti-inflammatory) used for treating a subject having or at risk of having an allergic immune response, or one or more symptoms caused by or associated with an allergen. For example, reducing an amount of an adjunct therapy, such as a reduction or decrease of a treatment for an allergic immune response, or one or more symptoms caused by or associated with an allergen, or a specific immunotherapy, vaccination or immunization protocol is considered a beneficial effect. In addition, reducing or decreasing an amount of the immunogen used for specific immunotherapy, vaccination or immunization of a subject to provide protection to the subject is considered a beneficial effect.

[0190] Methods and uses described herein may relieve one or more symptoms of an allergic immune response or delays the onset of symptoms, slow the progression of symptoms, or induce disease modification. For example, the following symptoms may be decreased or eliminated; nasal symptoms in the form of itchy nose, sneezing, runny nose, blocked nose; conjunctival symptoms in the form of itchy eyes, red eyes, watery eyes; and respiratory symptoms in the form of decreased lung function. Furthermore, the beneficial effect of methods and uses described herein may be observed by the patient's need for less concomitant treatment with corticosteroids or H1 antihistamines to suppress the symptoms.

[0191] When an immunogen is administered to induce tolerance, an amount or dose of the immunogen to be administered, and the period of time required to achieve a desired outcome or result (e.g., to desensitize or develop tolerance to the allergen or immunogen) can be determined by one skilled in the art. The immunogen may be administered to the patient through any route known in the art, including, but not limited to oral, inhalation, sublingual, epicutaneous, intranasal, and/or parenteral routes (intravenous, intramuscular, subcutaneously, intradermal, and intraperitoneal).

[0192] Methods and uses of the invention include administration of an immunogen to a subject prior to contact by or exposure to an allergen; administration prior to, substantially contemporaneously with or after a subject has been contacted by or exposed to an allergen; and administration prior to, substantially contemporaneously with or after an allergic immune response, or one or more symptoms caused by or associated with an allergen.

[0193] As used herein, a “sufficient amount” or “effective amount” or an “amount sufficient” or an “amount effective” refers to an amount that provides, in single (e.g., primary) or multiple (e.g., booster) doses, a long term or a short term detectable or measurable improvement in a given subject or any objective or subjective benefit to a given subject of any degree or for any time period or duration (e.g., for minutes, hours, days, months, years, or cured).

[0194] An amount sufficient or an amount effective need not be therapeutically or prophylactically effective in each and every subject treated, nor a majority of subjects treated in a given group or population. An amount sufficient or an amount effective means sufficiency or effectiveness in a particular subject, not a group of subjects or the general population. As is typical for such methods, different subjects will exhibit varied responses to a method of the invention, such as immunization, vaccination, specific immunotherapy and therapeutic treatments.

[0195] The term “subject” includes but is not limited to a subject at risk of allergen contact or exposure as well as a subject that has been contacted by or exposed to an allergen. A subject also includes those having or at risk of having or developing an immune response to an antigen or an allergen. Such subjects include mammalian animals (mammals), such domestic animal (dogs and cats), a farm animal (poultry such as chickens and ducks, horses, cows, goats, sheep, pigs), experimental animal (mouse, rat, rabbit, guinea pig) and humans.

[0196] Target subjects and subjects in need of treatment also include those at risk of allergen exposure or contact or at risk of having exposure or contact to an allergen. Accordingly, subjects include those at increased or elevated (high) risk of an allergic reaction; has, or has previously had or is at risk of developing hypersensitivity to an allergen; and those that have or have previously had or is at risk of developing asthma.

[0197] As mentioned, methods and uses described herein, relates to relieving an allergic immune response, e.g. preventing or treating an allergic immune response against a pollen allergen, which is not a grass pollen allergen by administering an immunogen described herein.

[0198] Non-grass pollen allergens are but not limited to pollen allergens of the plant families Asteraceae, Betulaceae, Fagaceae, Oleaceae, and/or Plantaginaceae, for example from pollen of a plant genus selected from any of Ambrosia, Artemisia, Helianthus, Alnus, Betula, Carpinus, Castanea, Corylus, Ostrya, Ostryopsis, Fagus, Quercus, Fraxinus, Ligustrum, Lilac or Plantago. Immunogens disclosed herein are conserved across a grass and at least a weed pollen and in particular embodiments, a non-grass pollen allergen is of the genus Ambrosia (e.g. Amb a and/ or Amb p). Immunogens disclosed herein are conserved across a grass and at least a Oak pollen and in particular embodiments, a non-grass pollen allergen is of the genus Quercus (e.g. Que a). Immunogens disclosed herein are conserved across a grass and at least a birch pollen and in particular embodiments, a non-grass pollen allergen is of the genus Betula (E.g. Bet v). Some immunogens are conserved across a grass, a weed and a tree pollen and in particular embodiments, a non-grass pollen allergen is of the genus Ambrosia, Betula and/or Oak. Where immunogens are conserved across several other pollen species, a non-grass pollen allergen may be e.g. Fraxinus, Alternaria or Plantago.

[0199] A grass pollen allergen includes for example a grass pollen allergen of the plant family Poales. The plant family Poales typically encompasses plant genera from any of Anthoxanthum, Conydon, Dactylis, Lollium, Phleum or Poa. In a particular embodiment, the allergic immune response is not against a grass pollen allergen of the plant genus Phleum, e.g. Phleum Pratense.

[0200] As immunogens of the invention are conserved across grass a pollen (e.g. Timothy grass pollen), the methods and uses described herein, comprises relieving an allergic immune response against grass pollen allergens as well as a non-grass pollen allergen.

[0201] Examples on well known non-grass pollen allergens are, but not limited to: Aln g 1, Aln g 4, Amb a 1, Amb a 2, Amb a 3, Amb a 4, Amb a 5, Amb a 6, Amb a 7, Amb a 8, Amb a 9, Amb a 10, Amb p 5, Amb t 5, Art v 1, Art v 2, Art v 3, Art v 4, Art v 5, Art v 6, Bet v 1, Bet v 2, Bet v 3, Bet v 4, Bet v 6, Bet v 7,Car b 1, Cas s 1, Cor a 6, Cor a 10, Fag s 1, Fra e 1, Hel a 1, Hel a, Lig v 1, Ole e 1, Ole e 2, Ole e 3, Ole e 4, Ole e 5, Ole e 6, Ole e 7, Ole e 8, Ole e 9, Ole e 10, Ole e 11, Ost c 1, Pla I, Que a 1, Syr v 1, Syr v 3.

[0202] Many of the well known pollen allergens are major allergens and thought to be the most important allergens in eliciting an allergic immune in a subject. Thus, in some embodiments, the non-grass pollen allergen at least is Amb a 1, Que a 1, Bet v 1, Bet v 2 and/ or Ole e 1.

[0203] Examples on grass pollen allergens are but not limited to; Ant o 1, Cyn d 1, Cyn d 7, Cyn d 12, Cyn d 15, Cyn d 22w, Cyn d 23, Cyn d 24, Dac g 1, Dac g 2, Dac g 3, Dac g 4, Dac g 5, Fes p 4, Hol I 1, Hol I 5, Hor v 1, Hor v 5, Lol p 1, Lol p 2, Lol p 3, Lol p 4, Lol p 5, Lol p 11, Ory s 1, Pas n 1, Pha a 1, Pha a 5, Phl p 1, Phl p 2, Phl p 4, Phl p 5, Phl p , Phl p 7, Phl p 11, Phl p 12, Phl p 13, Poa p 1, Poa p 5, Sec c 1, Sec c 5, Sec c 38 and/or Sor h 1, of which group 1 (e.g. Ant o 1, Cyn d 1, Dac g 1, Hol 1, Lol p 1, Pha a 1, Phl p 1 and Poa p) or group 5 allergens (Dac g 5, Lol p 5, Pha a 5, Phl p 5, Poa p 5) are considered major allergens important for the allergic immune response triggered by a grass pollen in a subject,

[0204] “Prophylaxis” and grammatical variations thereof mean a method or use in which contact, administration or in vivo delivery to a subject is prior to contact with or exposure to an allergen. In certain situations it may not be known that a subject has been contacted with or exposed to an allergen, but administration or in vivo delivery to a subject can be performed prior to manifestation of an allergic immune response, or one or more symptoms caused by or associated with an allergen. For example, a subject can be provided protection against an allergic immune response, or one or more symptoms caused by or associated with an allergen or provided immunotherapy with an immunogen of the present invention. In such case, a method or use can eliminate, prevent, inhibit, suppress, limit, decrease or reduce the probability of or susceptibility towards an allergic immune response, or one or more physiological conditions, symptoms or complications caused by or associated with an antigen/allergen.

[0205] “Prophylaxis” can also refer to a method or use in which contact, administration or in vivo delivery to a subject is prior to a secondary or subsequent exposure to an antigen/ allergen. In such a situation, a subject may have had a prior contact or exposure to an allergen. In such subjects, an acute allergic reaction may but need not be resolved. Such a subject typically may have developed anti-allergen antibodies due to the prior exposure. Immunization or vaccination, by administration or in vivo delivery to such a subject, can be performed prior to a secondary or subsequent allergen exposure. Such a method or use can eliminate, prevent, inhibit, suppress, limit, decrease or reduce the probability of or susceptibility towards a secondary or subsequent allergic immune response, or one or more symptoms caused by or associated with an allergen. In certain embodiments, such a method or use includes providing specific immunotherapy to the subject to eliminate, prevent, inhibit, suppress, limit, decrease or reduce the probability of or susceptibility towards a secondary or subsequent allergic immune response, or one or more physiological conditions, symptoms or complications caused by or associated with an antigen/allergen.

[0206] Treatment of an allergic reaction or response can be at any time during the reaction or response. An immunogen can be administered as a single or multiple dose e.g., one or more times hourly, daily, weekly, monthly or annually or between about 1 to 10 weeks, or for as long as appropriate (e.g. 3 months, 6 months or more, for example, to achieve a reduction in the onset, progression, severity, frequency, duration of one or more symptoms or complications associated with or caused by an allergic immune response, or one or more physiological conditions, symptoms or complications caused by or associated with an antigen/allergen.

[0207] Accordingly, methods and uses of the invention can be practiced one or more times (e.g., 1-10, 1-5 or 1-3 times) an hour, day, week, month, or year. The skilled artisan will know when it is appropriate to delay or discontinue administration. Doses can be based upon current existing protocols, empirically determined, using animal disease models or optionally in human clinical trials. Initial study doses can be based upon animal studies, e.g. a mouse, and the sufficient amount of immunogen to be administered for being effective can be determined. Exemplary non-limiting amounts (doses) are in a range of about 0.1 mg/kg to about 100 mg/kg, and any numerical value or range or value within such ranges. Greater or lesser amounts (doses) can be administered, for example, 0.01-500 mg/kg, and any numerical value or range or value within such ranges. The dose can be adjusted according to the mass of a subject, and will generally be in a range from about 1-10 ug/kg, 10-25 ug/kg, 25-50 ug/kg, 50-100 ug/kg, 100-500 ug/kg, 500-1,000 ug/kg, 1-5 mg/kg, 5-10 mg/kg, 10-20 mg/kg, 20-50 mg/kg, 50-100 mg/kg, 100-250 mg/kg, 250-500 mg/kg, or more, two, three, four, or more times per hour, day, week, month or annually. A typical range will be from about 0.3 mg/kg to about 50 mg/kg, 0-25 mg/kg, or 1.0-10 mg/kg, or any numerical value or range or value within such ranges.

[0208] Doses can vary and depend upon whether the treatment is prophylactic or therapeutic, whether a subject has been previously exposed to the antigen/allergen, the onset, progression, severity, frequency, duration, probability of or susceptibility of the symptom, condition, pathology or complication, or vaccination or specific immunotherapy to which treatment is directed, the clinical endpoint desired, previous or simultaneous treatments, the general health, age, gender, race or immunological competency of the subject and other factors that will be appreciated by the skilled artisan. The skilled artisan will appreciate the factors that may influence the dosage and timing required to provide an amount sufficient for providing a therapeutic or prophylactic benefit.

[0209] Immunogens of the invention can be provided in compositions, and in turn such compositions can be used in accordance with the invention methods and uses. Such compositions, methods and uses include pharmaceutical compositions and formulations. In certain embodiments, a pharmaceutical composition includes one or more immunogens. In particular, aspects, such compositions and formulations may be a vaccine, including but not limited to a vaccine to protect against an allergic immune response, or one or more symptoms caused by or associated with an allergen.

[0210] A pharmaceutical comprises an immunogen of the invention and a pharmaceutically acceptable ingredient or carrier.

[0211] As used herein the term “pharmaceutically acceptable” and “physiologically acceptable” mean a biologically acceptable formulation, gaseous, liquid or solid, or mixture thereof, which is suitable for one or more routes of administration, in vivo delivery or contact. Such formulations include solvents (aqueous or non-aqueous), solutions (aqueous or non-aqueous), emulsions (e.g., oil-in-water or water-in-oil), suspensions, syrups, elixirs, dispersion and suspension media, coatings, isotonic and absorption promoting or delaying agents, compatible with pharmaceutical administration or in vivo contact or delivery. Aqueous and non-aqueous solvents, solutions and suspensions may include suspending agents and thickening agents. Such pharmaceutically acceptable carriers include tablets (coated or uncoated), capsules (hard or soft), microbeads, powder, granules and crystals.

[0212] Supplementary active compounds (e.g., preservatives, antibacterial, antiviral and antifungal agents) can also be incorporated into the compositions.

[0213] A composition may be lyophilized so as to enhance stability and ease of transportation. For the purpose of being used as a vaccine, the composition may be sterile.

[0214] Pharmaceutical compositions can be formulated to be compatible with a particular route of administration. Thus, pharmaceutical compositions include carriers, diluents, or excipients suitable for administration by various routes. Exemplary routes of administration for contact or in vivo delivery for which a composition can optionally be formulated include inhalation, intranasal, oral, buccal, sublingual, subcutaneous, intradermal, epicutaneous, rectal, transdermal, or intralymphatic.

[0215] In some embodiments, the pharmaceutical composition is aqueous and, in other embodiments, the composition is non-aqueous solutions, suspensions or emulsions of the peptide/protein, which compositions are typically sterile and can be isotonic with the biological fluid or organ of the intended recipient. Non-limiting illustrative examples include water, saline, dextrose, fructose, ethanol, vegetable or synthetic oils.

[0216] For oral, buccal or sublingual administration, a composition can take the form of for example a solid dosage form, e.g. tablets or capsules, optionally formulated as fast-integrating tablets/capsules or slow-release tablets/capsules. In some embodiments, the tablet is a freeze-dried, optionally fast-disintegrating tablet suitable for being administered under the tongue. A solid dosage form optionally is sterile, optionally anhydrous.

[0217] The pharmaceutical composition may also be formulated into a “unit dosage form”. As used herein a unit dosage form refers to physically discrete units suited as unitary dosages for the subject to be treated; each unit containing a predetermined quantity of a peptide/protein optionally in association with a pharmaceutical carrier (excipient, diluent, vehicle or filling agent) which, when administered in one or more doses, is calculated to produce a desired effect. Unit dosage forms also include, for example, ampules and vials, which may include a composition in a freeze-dried or lyophilized state; a sterile liquid carrier, for example, can be added prior to administration or delivery in vivo. Unit dosage forms additionally include, for example, ampules and vials with liquid compositions disposed therein. Individual unit dosage forms can be included in multi-dose kits or containers. Pharmaceutical formulations can be packaged in single or multiple unit dosage form for ease of administration and uniformity of dosage.

[0218] To increase an immune response, immunological tolerance or protection against an allergic immune response, or one or more symptoms caused by or associated with an allergen, immunogens can be mixed with adjuvants.

[0219] Adjuvants include, for example: oil (mineral or organic) emulsion adjuvants such as Freund's complete (CFA) and incomplete adjuvant (IFA) (WO 95/17210; WO 98/56414; WO 99/12565; WO 99/11241; and U.S. Pat. No. 5,422,109); metal and metallic salts, such as aluminum and aluminum salts, such as aluminum phosphate or aluminum hydroxide, alum (hydrated potassium aluminum sulfate); bacterially derived compounds, such as Monophosphoryl lipid A and derivatives thereof (e.g., 3 De-O-acylated monophosphoryl lipid A, aka 3D-MPL or d3-MPL, to indicate that position 3 of the reducing end glucosamine is de-O-acylated, 3D-MPL consisting of the tri and tetra acyl congeners), and enterobacterial lipopolysaccharides (LPS); plant derived saponins and derivatives thereof, for example Quil A (isolated from the Quilaja Saponaria Molina tree, see, e.g., “Saponin adjuvants”, Archiv. fur die gesamte Virusforschung, Vol. 44, Springer Verlag, Berlin, p243-254; U.S. Pat. No. 5,057,540), and fragments of Quil A which retain adjuvant activity without associated toxicity, for example QS7 and QS21 (also known as QA7 and QA21), as described in WO96/33739, for example; surfactants such as, soya lecithin and oleic acid; sorbitan esters such as sorbitan trioleate; and polyvinylpyrrolidone; oligonucleotides such as CpG (WO 96/02555, and WO 98/16247), polyriboA and polyriboU; block copolymers; and immunostimulatory cytokines such as GM-CSF and IL-1, and Muramyl tripeptide (MTP). Additional examples of adjuvants are described, for example, in “Vaccine Design—the subunit and adjuvant approach” (Edited by Powell, M. F. and Newman, M. 3.; 1995, Pharmaceutical Biotechnology (Plenum Press, New York and London, ISBN 0-306-44867-X) entitled “Compendium of vaccine adjuvants and excipients” by Powell, M. F. and Newman M.

[0220] Cosolvents may be added to the composition. Non-limiting examples of cosolvents contain hydroxyl groups or other polar groups, for example, alcohols, such as isopropyl alcohol; glycols, such as propylene glycol, polyethyleneglycol, polypropylene glycol, glycol ether; glycerol; polyoxyethylene alcohols and polyoxyethylene fatty acid esters. Non-limiting examples of cosolvents contain hydroxyl groups or other polar groups, for example, alcohols, such as isopropyl alcohol; glycols, such as propylene glycol, polyethyleneglycol, polypropylene glycol, glycol ether; glycerol; polyoxyethylene alcohols and polyoxyethylene fatty acid esters.

[0221] Supplementary compounds (e.g., preservatives, antioxidants, antimicrobial agents including biocides and biostats such as antibacterial, antiviral and antifungal agents) can also be incorporated into the compositions. Pharmaceutical compositions may therefore include preservatives, anti-oxidants and antimicrobial agents.

[0222] Preservatives can be used to inhibit microbial growth or increase stability of ingredients thereby prolonging the shelf life of the pharmaceutical formulation. Suitable preservatives are known in the art and include, for example, EDTA, EGTA, benzalkonium chloride or benzoic acid or benzoates, such as sodium benzoate. Antioxidants include, for example, ascorbic acid, vitamin A, vitamin E, tocopherols, and similar vitamins or provitamins.

[0223] An antimicrobial agent or compound directly or indirectly inhibits, reduces, delays, halts, eliminates, arrests, suppresses or prevents contamination by or growth, infectivity, replication, proliferation, reproduction, of a pathogenic or non- pathogenic microbial organism. Classes of antimicrobials include antibacterial, antiviral, antifungal and antiparasitics. Antimicrobials include agents and compounds that kill or destroy (-cidal) or inhibit (-static) contamination by or growth, infectivity, replication, proliferation, reproduction of the microbial organism.

[0224] Pharmaceutical formulations and delivery systems appropriate for the compositions, methods and uses of the invention are known in the art (see, e.g. Remington: The Science and Practice of Pharmacy (David B. Troy, Paul Beringer Lippincott Williams & Wilkins) 2006).

[0225] Pharmaceutical compositions can be formulated to be compatible with a particular route of administration. Thus, pharmaceutical compositions include carriers, diluents, or excipients suitable for administration by various routes (For example excipients recorded in a Pharmacopiea). Exemplary routes of administration for contact or in vivo delivery, which a composition can optionally be formulated, include inhalation, respiration, intranasal, intubation, intrapulmonary instillation, oral, buccal, intrapulmonary, intradermal, topical, dermal, parenteral, sublingual, subcutaneous, intravascular, intrathecal, intraarticular, intracavity, transdermal, iontophoretic, intraocular, opthalmic, optical, intravenous (i.v.), intramuscular, intraglandular, intraorgan, or intralymphatic.

[0226] Formulations suitable for parenteral administration include aqueous and non-aqueous solutions, suspensions or emulsions of the active compound, which preparations are typically sterile and can be isotonic with the blood of the intended recipient. Non-limiting illustrative examples include water, saline, dextrose, fructose, ethanol, animal, vegetable or synthetic oils.

[0227] Methods and uses of the invention may be practiced by any mode of administration or delivery, or by any route, systemic, regional and local administration or delivery.

[0228] Exemplary administration and delivery routes include intravenous (i.v.), intraperitoneal (i.p.), intrarterial, intramuscular, parenteral, subcutaneous, intra-pleural, topical, dermal, intradermal, transdermal, transmucosal, intra-cranial, intra-spinal, rectal, oral (alimentary), mucosal, inhalation, respiration, intranasal, intubation, intrapulmonary, intrapulmonary instillation, buccal, sublingual, intravascular, intrathecal, intracavity, iontophoretic, intraocular, ophthalmic, optical, intraglandular, intraorgan, or intralymphatic.

[0229] For oral administration, a composition can take the form of, for example, tablets or capsules prepared by conventional means with pharmaceutically acceptable excipients such as binding agents (for example, pregelatinised maize starch, polyvinylpyrrolidone or hydroxypropyl methylcellulose); fillers (for example, lactose, microcrystalline cellulose or calcium hydrogen phosphate); lubricants (for example, magnesium stearate, talc or silica); disintegrants (for example, potato starch or sodium starch glycolate); or wetting agents (for example, sodium lauryl sulphate). The tablets can be coated by methods known in the art. Liquid preparations for oral administration can take the form of, for example, solutions, syrups or suspensions, or they can be presented as a dry product for constitution with water or other suitable vehicle before use. Such liquid preparations can be prepared by conventional means with pharmaceutically acceptable additives such as suspending agents (for example, sorbitol syrup, cellulose derivatives or hydrogenated edible fats); emulsifying agents (for example, lecithin or acacia); non-aqueous vehicles (for example, almond oil, oily esters, ethyl alcohol or fractionated vegetable oils); and preservatives (for example, methyl or propyl-p-hydroxybenzoates or sorbic acid).

[0230] Unless otherwise defined, all technical and scientific terms used herein have the same meaning as commonly understood by one of ordinary skill in the art to which this invention belongs. Although methods and materials similar or equivalent to those described herein can be used in the practice or testing of the present invention, suitable methods and materials are described herein.

[0231] All publications and patent applications cited in this specification are herein incorporated by reference as if each individual publication or patent application were specifically and individually indicated to be incorporated by reference. The citation of any publication is for its disclosure prior to the filing date and should not be construed as an admission that the invention is not entitled to antedate such publication by virtue of prior invention.

[0232] As used in this specification and the appended claims, the use of an indefinite article or the singular forms “a,” “an” and “the” include plural reference unless the context clearly dictates otherwise. In addition, it should be understood that the individual peptides, proteins, antigens, allergens (referred to collectively as compositions), or groups of compositions, modeled or derived from the various components or combinations of the compositions, and substituents described herein, are disclosed by the application to the same extent as if each composition or group of compositions was set forth individually. Thus, selection of particular peptides, proteins, antigens, allergens, etc. is clearly within the scope of the invention.

[0233] As used in this specification and the appended claims, the terms “comprise”, “comprising”, “comprises” and other forms of these terms are intended in the non-limiting inclusive sense, that is, to include particular recited elements or components without excluding any other element or component. Unless defined otherwise all technical and scientific terms used herein have the same meaning as commonly understood to one of ordinary skill in the art to which this invention belongs. As used herein, “about” means + or −5%. The use of the wild type (e.g., “or”) should be understood to mean one, both, or any combination thereof of the wild types, i.e., “or” can also refer to “and.”

[0234] As used in this specification and the appended claims, any concentration range, percentage range, ratio range or other integer range is to be understood to include the value of any integer within the recited range and, when appropriate, fractions thereof (such as one tenth and one hundredth of an integer), unless otherwise indicated. For example, although numerical values are often presented in a range format throughout this document, a range format is merely for convenience and brevity and should not be construed as an inflexible limitation on the scope of the invention. Accordingly, the use of a range expressly includes all possible subranges, all individual numerical values within that range, and all numerical values or numerical ranges including integers within such ranges and fractions of the values or the integers within ranges unless the context clearly indicates otherwise. This construction applies regardless of the breadth of the range and in all contexts throughout this patent document. Thus, to illustrate, reference to a range of 90-100% includes 91-99%, 92-98%, 93-95%, 91-98%, 91-97%, 91-96%, 91-95%, 91-94%, 91-93%, and so forth. Reference to a range of 90-100%, includes 91%, 92%, 93%, 94%, 95%, 95%, 97%, etc., as well as 91.1%, 91.2%, 91.3%, 91.4%, 91.5%, etc., 92.1%, 92.2%, 92.3%, 92.4%, 92.5%, etc., and so forth. Reference to a range of 5-10, 10-20, 20-30, 30-40, 40-50, 50-75, 75-100, 100-150, and 150-175, includes ranges such as 5-20, 5-30, 5-40, 5-50, 5-75, 5-100, 5-150, 5-171, and 10-30, 10-40, 10-50, 10-75, 10-100, 10-150, 10-175, and 20-40, 20-50, 20-75, 20-100, 20-150, 20-175, and so forth. Further, for example, reference to a series of ranges of 2-72 hours, 2-48 hours, 4-24 hours, 4-18 hours and 6-12 hours, includes ranges of 2-6 hours, 2, 12 hours, 2-18 hours, 2-24 hours, etc., and 4-27 hours, 4-48 hours, 4-6 hours, etc.

[0235] Although the foregoing invention has been described in some detail by way of illustration and example for purposes of clarity of understanding, it is readily apparent to those of ordinary skill in the art in light of the teachings of this invention that certain changes and modifications may be made thereto without departing from the spirit or scope of the appended claims. The invention is further exemplified by way of the following non-limited examples.

### REFERENCES

[0236] Oseroff C, Sidney 3, Kotturi MF, Kolla R, Alam R, Broide DH, et al. Molecular determinants of T cell epitope recognition to the common Timothy grass allergen. Journal of immunology 2010; 185:943-55.

[0237] P. Wang, 3. Sidney, C. Dow, B. Mothe, A. Sette, B. Peters. A systematic assessment of MHC class II peptide binding predictions and evaluation of a consensus approach. PLoS Comput Biol, 4 (2008), p. e1000048

[0238] P. Wang, 3. Sidney, Y. Kim, A. Sette, 0. Lund, M. Nielsen, et al. Peptide binding predictions for HLA DR, DP and DQ molecules. BMC Bioinform, 11 (2010), p. 568

[0239] Karosiene, Edita, Michael Rasmussen, Thomas Blicher, Ole Lund, Soren Buus, and Morten Nielsen. “NetMHClIpan-3.0, a Common Pan-specific MHC Class II Prediction Method Including All Three Human MHC Class II Isotypes, HLA-DR, HLA-DP and HLA-DQ.” Immunogenetics

### Tables

[0240] Table 1 indicates for each of the 397 PG+ peptides in which non-grass pollen species a matching peptide with either less than 3, less than 2 or zero mismatches are found. The number of TG grass allergic donors (n=20) with an in vitro T cell response to the TG peptide sequence is also shown.

TABLE 1
Table 1 Identification of conserved sequences across grass pollen and non-grass pollen.

| | | | | | | | | | | | | | | | | | | | | | # T cell | | |
|---|---|---|---|---|---|---|---|---|---|---|---|---|---|---|---|---|---|---|---|---|---|---|---|
| | | | | | | | | | | | | | | | | | | | | | responders | | |
| SEQ | | | Non-grass pollen species | | | | | | | | | | | | | | | | | | to TG | | |
| ID | NTGA | Phl p Sequence | Amb p | | | Pla l | | | Ole e | | | Fra e | | | Que a | | | Bet v | | | sequence | | |
| No | ID | (PG + peptide) | <3 | <2 | 0 | <3 | <2 | 0 | <3 | <2 | 0 | <3 | <2 | 0 | <3 | <2 | 0 | <3 | <2 | 0 | >0 | >1 | >2 |
| 1 | 1 | SDGTFARAAVPSGAS | x | x | | | | | | | | | | | x | | | | | | | | |
| 2 | 1 | KLGANAILAVSLAVC | x | x | x | x | x | | x | x | x | x | x | x | x | x | x | x | x | x | | | |
| 3 | 1 | KKIPLYQHIANLAGN | x | x | | | | | | | | | | | x | x | x | x | x | x | | | |
| 4 | 1 | GNKQLVLPVPAFNVI | x | x | | x | x | | x | x | | x | x | | x | x | | x | x | | x | | |
| 5 | 1 | KLAMQEFMILPTGAS | x | x | | x | x | x | x | x | | x | x | | x | x | | x | x | | | | |
| 6 | 1 | KMGVEVYHNLKSVIK | x | x | x | x | | | x | x | | x | x | | x | x | x | x | | | | | |
| 7 | 1 | GKVVIGMDVAASEFY | x | x | | x | x | x | x | x | x | x | x | x | x | x | x | x | x | x | | | |
| 8 | 1 | VYKSFVSEYPIVSIE | x | x | | x | | | x | x | | x | x | | x | x | | x | | | x | | |
| 9 | 1 | IVGDDLLVTNPTRVA | x | x | | x | x | | x | | | x | | | x | | | x | x | | x | | |
| 10 | 1 | NALLLKVNQIGSVTE | x | x | x | x | x | x | x | x | x | x | x | x | x | x | x | x | x | x | x | | |
| 11 | 1 | ETEDTFIADLAVGLS | x | x | | x | | | x | | | x | | | x | | | x | | | | | |
| 12 | 1 | RAAVPSGASTGVYEA | x | x | | x | x | | x | x | | x | x | x | x | x | | x | x | x | | | |
| 13 | 1 | ERLAKYNQLLRIEEE | x | x | x | x | x | x | x | x | x | x | x | x | x | x | x | x | x | x | | | |
| 14 | 1 | LGAAAVYAGLKFRAP | x | x | | | | | | | | | | | x | | | | | | x | | |
| 15 | 1 | GASTGVYEALELRDG | x | x | | x | x | | x | x | | x | x | x | x | x | | x | x | x | | | |
| 16 | 1 | QTELDNFMVHQLDGT | | | | x | | | | | | | | | | | | | | | | | |
| 17 | 1 | VDNVNSIIGPALIGK | | | | x | | | x | x | | x | x | | | | | x | | | | | |
| 18 | 2 | ENRSVLHVALRAPRD | | | | x | x | x | x | x | | x | x | | x | x | | x | | | x | x | |
| 19 | 2 | FLGPLFVHTALQTDP | | | | x | x | x | x | x | | x | x | | x | x | x | x | x | x | x | | |
| 20 | 2 | RQLRFLANVDPVDVA | x | x | x | x | x | | x | x | | x | x | | x | x | | x | x | | x | | |
| 21 | 2 | VVSKTFTTAETMLNA | x | x | x | x | x | x | x | x | x | x | x | x | x | x | x | x | x | x | x | | |
| 22 | 2 | VSKHMIAVSTNLKLV | x | x | | x | | | | | | | | | | | | | | | x | x | |
| 23 | 2 | RYSVCSAVGVLPLSL | x | x | x | x | x | | x | x | x | x | x | x | x | x | x | x | x | x | x | x | x |
| 24 | 2 | AVGVLPLSLQYGFPI | x | | | | | | x | | | x | | | x | | | x | | | x | x | x |
| 25 | 2 | VLLGLLSVWNVSFLG | x | x | x | x | x | x | x | x | | x | x | x | x | x | | x | x | | x | x | |
| 26 | 2 | SVWNVSFLGYPARAI | x | x | x | x | x | x | x | x | | x | x | x | x | x | | x | x | | x | x | |
| 27 | 2 | ARAILPYSQALEKLA | x | x | | x | x | x | x | x | | x | x | | x | x | | x | x | | x | | |
| 28 | 2 | NGQHSFYQLIHQGRV | x | x | x | x | x | x | x | x | x | x | x | x | x | x | x | x | x | x | x | x | |
| 29 | 2 | AYEIGQLLAIYEHRI | x | x | | | | | x | x | | x | x | | x | x | | x | x | | x | | |
| 30 | 2 | LLAIYEHRIAVQGFI | x | x | | | | | x | | | x | | | x | | | x | | | x | x | |
| 31 | 2 | QGFIWGINSFDQWGV | x | x | | x | | | x | | | x | | | x | | | x | | | x | | |
| 32 | 2 | ELMSNFFAQPDALAY | x | x | x | x | x | x | x | x | x | x | x | x | x | x | x | x | x | x | x | x | x |
| 33 | 3 | DDGKVYLEMSYYFEI | x | x | x | x | x | x | | | | x | x | x | x | x | x | | | | | | |
| 34 | 4 | PNLTYAKELVERMGL | x | x | | x | x | | x | x | | x | x | | x | x | | x | x | | x | | |
| 35 | 4 | RNMVLGKRFFVTPSD | x | x | | x | x | x | x | x | | x | x | | x | x | | x | x | | x | | |
| 36 | 4 | KRFFVTPSDSVAIIA | x | x | x | x | x | x | x | x | x | x | x | x | x | x | x | x | x | x | | | |
| 37 | 4 | SDSVAIIAANAVQSI | x | x | | x | x | x | x | x | | x | x | | x | x | | x | x | | | | |
| 38 | 4 | AVQSIPYFASGLKGV | x | | | x | x | | | | | | | | | | | | | | x | | |
| 39 | 4 | KNLNLKFFEVPTGWK | x | x | | x | x | x | x | x | | x | | | x | x | | x | x | | | | |
| 40 | 4 | GIWAVLAWLSIIAYK | x | x | | x | x | | x | x | | x | x | | x | x | | x | x | | x | | |
| 41 | 4 | LVSVEDIVLQHWATY | | | | | | | x | x | | | | | x | | | x | | | | | |
| 42 | 4 | HQGIRYLFGDGSRLV | x | | | x | | | x | x | | x | x | x | x | x | | x | x | | | | |
| 43 | 4 | SRLVFRLSGTGSVGA | x | x | | x | x | | x | x | | x | x | | x | x | | x | x | | | | |
| 44 | 4 | GATIRIYIEQYEKDS | x | x | | x | | | x | | | x | x | | x | | | | | | | | |
| 45 | 4 | DALSPLVDVALKLSK | x | | | x | x | | | | | x | | | x | | | | | | | | |
| 46 | 5 | LDIAVRLLEPIKEQV | x | x | | | | | | | | | | | x | x | | | | | | | |
| 47 | 5 | IKEQVPILSYADFYQ | | | | x | x | | x | | | | | | x | | | x | x | | | | |
| 48 | 5 | ILSYADFYQLAGVVA | x | | | x | x | | x | x | x | | | | x | x | | x | x | x | | | |
| 49 | 5 | FYQLAGVVAVEITGG | x | x | | x | x | x | x | x | | x | | | x | x | x | x | x | | | | |
| 50 | 5 | NPLIFDNSYFTELLT | x | x | | x | x | | x | | | x | | | x | | | x | | | | | |
| 51 | 5 | EDAFFADYAEAHLKL | x | x | x | x | x | x | x | x | x | x | x | x | x | x | x | x | x | x | | | |
| 52 | 6 | DNEKSGFISLVSRYL | | | | x | | | | | | | | | | | | | | | x | x | |
| 53 | 6 | IEVRNGFTFLDLIVL | x | | | x | | | x | | | x | | | x | | | x | | | x | x | |
| 54 | 6 | FLDLIVLQIESLNKK | x | x | | x | | | x | | | x | | | | | | x | | | x | | |
| 55 | 6 | LNKKYGSNVPLLLMN | x | | | | | | x | | | x | | | x | | | x | | | x | | |
| 56 | 6 | NVPLLLMNSFNTHED | x | x | | x | | | x | | | x | | | x | x | | x | x | | x | | |
| 57 | 6 | LKIVEKYANSSIDIH | | | | | | | x | | | | | | | | | | | | x | x | x |
| 58 | 6 | GKLDLLLSQGKEYVF | x | x | | | | | x | | | x | | | x | x | x | x | x | | x | x | |
| 59 | 6 | GKEYVFIANSDNLGA | x | x | | x | x | | x | x | | x | x | | x | x | x | x | x | x | x | x | x |
| 60 | 6 | SDNLGAIVDMKILNH | x | | | x | | | x | x | | x | | | x | | | x | | | x | x | x |
| 61 | 6 | ISYEGRVQLLEIAQV | x | | | x | x | | x | x | | x | x | | x | x | x | x | x | x | | | |
| 62 | 6 | VQLLEIAQVPDAHVD | x | x | | x | | | x | | | | | | x | | | x | | | x | | |
| 63 | 6 | FKSIEKFKIFNTNNL | x | x | x | x | x | x | x | x | x | x | x | x | x | x | x | x | x | x | x | | |
| 64 | 6 | FKIFNTNNLWVNLKA | x | x | | x | | | x | x | | x | x | | x | x | | x | x | x | x | x | x |
| 65 | 6 | NNLWVNLKAIKRLVE | x | | | | | | x | | | x | | | x | x | | x | x | x | x | x | x |
| 66 | 6 | IKRLVEADALKMEII | x | x | | | | | x | x | | x | x | | x | x | x | x | x | | x | x | |
| 67 | 6 | VKVLQLETAAGAAIR | x | x | | x | | | x | | | x | x | | x | x | | x | | | x | x | x |
| 68 | 6 | AAIRFFDHAIGINVP | x | | | x | x | | x | | | x | x | | x | | | x | | | x | x | x |
| 69 | 6 | GINVPRSRFLPVKAT | x | x | | x | | | x | x | x | x | x | x | x | x | | x | x | x | x | | |
| 70 | 6 | RFLPVKATSDLQLVQ | x | | | x | x | | x | x | | x | x | | x | x | | x | x | | x | x | |
| 71 | 6 | TSDLQLVQSDLYTLV | | | | x | | | x | | | x | | | x | | | | | | x | | |
| 72 | 6 | VQSDLYTLVDGFVTR | | | | x | | | x | x | | x | x | | x | | | x | | | x | x | |
| 73 | 6 | GPEFKKVGSFLGRFK | x | | | x | | | | | | | | | x | | | x | | | x | x | |
| 74 | 6 | GRFKSIPSIVELDSL | | | | x | | | | | | x | | | x | x | | | | | x | x | x |
| 75 | 7 | GTIRNIINGTVFREP | x | x | | x | x | | x | x | | x | x | | x | x | | x | x | | x | x | x |
| 76 | 7 | VFNFTGAGGVALAMY | x | | | x | | | x | | | x | | | x | x | | x | x | | x | x | x |
| 77 | 7 | EKKWPLYLSTKNTIL | x | x | | x | x | x | x | x | | x | x | | x | x | | x | x | | x | | |
| 78 | 7 | GRFKDIFQAVYEADW | x | | | x | | | x | | | | | | x | | | | | | x | x | x |
| 79 | 7 | WYEHRLIDDMVAYAL | x | x | x | x | x | x | x | x | x | x | x | x | x | x | | x | x | x | x | | |
| 80 | 7 | VQSDFLAQGFGSLGL | x | x | x | x | x | x | x | x | x | x | x | x | x | x | x | x | x | x | x | x | |
| 81 | 7 | NSIASIFAWTRGLAH | x | x | x | x | x | x | x | x | x | x | x | x | x | x | x | x | x | x | x | | |
| 82 | 7 | DNARLLDFTQKLEDA | | | | | | | | | | | | | x | | | | | | x | x | |
| 83 | 7 | LNTEEFIDAVAAELQ | x | | | x | | | x | | | | | | x | | | x | x | | x | x | x |
| 84 | 9 | KSLVRAFMWDSGSTV | x | | | x | | | x | | | x | | | x | | | x | | | | | |
| 85 | 9 | RVLSCDFKPTRPFRI | x | x | | x | x | | x | x | | x | x | | x | x | | x | x | | x | x | |
| 86 | 9 | HTGSIYAVSWSADSK | x | | | x | x | | x | | | x | | | | | | | | | | | |
| 87 | 9 | IHYSPDVSMFASADA | x | x | x | | | | x | x | | | | | | | | | | | x | x | |
| 88 | 9 | IKLKNMLFHTARINC | | | | x | | | | | | | | | x | | | x | | | x | | |
| 89 | 10 | GRYFSKDAVQIITKM | | | | x | | | | | | | | | x | | | | | | x | | |
| 90 | 10 | DAVQIITKMAAANGV | | | | x | | | x | | | x | | | x | | | x | | | x | | |
| 91 | 10 | GVRRVWVGQDSLLST | | | | | | | | | | | | | x | | | x | | | x | x | |
| 92 | 11 | SVGFVETLENDLAQL | | | | | | | x | x | | x | | | x | | | x | x | | x | | |
| 93 | 11 | LGEAPYKFKSALEAV | | | | x | x | | x | | | x | | | | | | x | x | | x | x | |
| 94 | 11 | KFKSALEAVKTLRAE | | | | x | x | | | | | | | | | | | | | | x | | |
| 95 | 11 | VVTFNFRADRMVMLA | x | x | | x | x | | x | x | | x | x | | x | | | x | | | x | x | |
| 96 | 11 | ADRMVMLAKALEFAD | | | | | | | x | | | x | | | | | | | | | x | | |
| 97 | 11 | FDKFDRVRVPKIKYA | x | x | | x | x | | x | | | x | | | x | x | | | | | | | |
| 98 | 11 | PKIKYAGMLQYDGEL | x | x | | x | x | | x | x | | x | x | | x | x | | x | x | | | | |
| 99 | 13 | ECILSGLLSVDGLKV | x | x | x | x | x | x | x | x | x | x | x | x | x | x | x | x | x | x | | | |
| 100 | 13 | LLSVDGLKVLHMDRN | x | x | x | x | x | | x | x | x | x | x | x | x | x | x | x | x | x | | | |
| 101 | 13 | VPKFMMANGALVRVL | x | | | x | x | | x | | | x | | | x | | | x | | | | | |
| 102 | 13 | VRVLIRTSVTKYLNF | x | x | | x | | | | | | | | | | | | | | | | | |
| 103 | 13 | TKYLNFKAVDGSFVY | x | x | x | x | x | | x | x | x | x | x | x | x | x | | x | x | | | | |
| 104 | 13 | TDVEALKSNLMGLFE | x | x | | x | x | | x | | | x | | | x | x | | | | | | | |
| 105 | 13 | EKRRARKFFIYVQDY | x | x | | x | x | x | x | x | | x | x | | x | x | x | x | x | x | | | |
| 106 | 13 | KFFIYVQDYEEEDPK | x | | | x | | | | | | x | | | x | | | x | | | | | |
| 107 | 13 | TVDFIGHALALHRDD | x | x | x | x | x | | x | x | | x | x | x | x | x | x | x | x | x | | | |
| 108 | 13 | VKRM KLYAESLARFQ | | | | x | x | x | x | x | x | x | x | x | x | x | x | x | x | x | | | |
| 109 | 13 | GELPQAFARLSAVYG | x | x | x | x | x | x | x | x | x | x | x | x | x | x | x | x | x | x | | | |
| 110 | 13 | FARLSAVYGGTYMLN | x | x | x | x | x | x | x | x | x | x | x | x | x | x | x | x | x | x | | | |
| 111 | 13 | KGKFIAFVSTEAETD | x | x | x | x | x | x | x | x | x | x | x | x | x | x | x | x | x | x | | | |
| 112 | 13 | ETTVKDVLALYSKIT | | | | | | | | | | x | x | x | x | x | | | | | | | |
| 113 | 13 | LDLSVDLNAASAGES | | | | | | | | | | x | x | | x | x | | | | | | | |
| 114 | 16 | DEKLLSVFREGVVYG | x | x | | x | x | x | x | x | | x | x | | x | x | | x | x | | x | | |
| 115 | 16 | GPGVYDIHSPRIPSK | x | x | | x | x | | x | x | | x | x | | x | x | | x | x | | x | x | |
| 116 | 18 | GAMEKLYDAGKARAI | x | | | | | | | | | | | | | | | | | | | | |
| 117 | 18 | KARAIGVSNLASKKL | | | | | | | | | | | | | x | | | | | | | | |
| 118 | 18 | KKLGDLLAVARIPPA | x | | | x | x | | | | | x | x | | | | | x | | | | | |
| 119 | 19 | LNGPFIATVQQRGAA | | | | | | | | | | | | | x | | | | | | | | |
| 120 | 19 | QQRGAAIIKARKLSS | x | x | x | x | x | | x | x | x | x | x | x | x | x | x | x | x | x | | | |
| 121 | 19 | IIKARKLSSALSAAS | x | x | x | x | x | | x | x | x | x | x | x | x | x | x | x | x | x | | | |
| 122 | 19 | LSSALSAASSACDHI | x | x | x | x | x | | x | x | x | x | x | x | x | x | x | x | x | x | | | |
| 123 | 19 | GTPEGTFVSMGVYSD | x | | | x | x | | x | x | | x | x | | x | x | | x | x | | | | |
| 124 | 20 | LGLPVFNSVAEAKAE | | | | x | x | x | x | x | x | x | x | x | x | x | | x | x | x | | | |
| 125 | 20 | TKANASVIYVPPPFA | x | x | x | x | x | x | x | x | x | x | x | x | x | x | x | x | x | x | | | |
| 126 | 20 | VIYVPPPFAAAAIME | x | x | x | x | | | x | x | | x | x | | x | | | x | x | x | | | |
| 127 | 20 | PFAAAAIMEALEAEL | x | x | x | | | | x | | | x | | | | | | x | x | x | | | |
| 128 | 20 | QHDMVKVKAALNRQS | x | | | x | | | x | | | x | x | | x | | | | | | | | |
| 129 | 20 | TLTYEAVFQTTAVGL | x | | | x | x | x | x | x | x | x | x | x | x | x | x | x | x | x | | | |
| 130 | 20 | DKPVVAFIAGLTAPP | | | | x | x | x | x | | | x | | | x | | | | | | x | | |
| 131 | 20 | KIKALREAGVTVVES | x | | | x | | | x | x | | x | x | | x | x | | x | x | | x | | |
| 132 | 21 | GSGDFKTIKEALAKV | x | x | | x | x | | x | x | | x | x | | x | x | | | | | | | |
| 133 | 21 | MYVMYIKEGTYKEYV | x | x | | x | x | | x | x | | x | x | | x | x | | | | | | | |
| 134 | 21 | VTNLVMIGDGAAKTI | x | x | | x | | | x | x | | x | x | | x | x | | | | | | | |
| 135 | 21 | YQDTLYTHAQRQFFR | x | x | x | x | | | x | x | x | x | x | x | x | x | x | x | | | | | |
| 136 | 21 | GTIDFIFGNSQVVIQ | x | | | x | | | x | | | x | | | x | | | | | | | | |
| 137 | 22 | DGYYIHGQCAIIMFD | x | x | x | x | x | x | x | x | x | x | x | x | x | x | x | x | x | x | x | | |
| 138 | 22 | QCAIIMFDVTSRLTY | x | x | | x | x | | x | x | | x | x | | x | x | | x | x | | x | | |
| 139 | 22 | RKKNLQYYEISAKSN | x | x | x | x | x | x | x | x | x | x | x | x | x | x | x | x | x | x | | | |
| 140 | 22 | SAKSNYNFEKPFLYL | x | x | x | x | x | x | x | x | x | x | x | x | x | x | x | x | x | x | | | |
| 141 | 22 | KPFLYLARKLAGDAN | x | x | | x | x | x | x | x | x | x | x | | x | x | x | | | | x | x | |
| 142 | 22 | EAELAAAAAQPLPDD | x | | | x | x | | x | x | | x | x | | | | | x | | | x | | |
| 143 | 24 | KGKKVFLRADLNVPL | | | | x | x | | x | | | | | | x | x | | x | x | | x | x | x |
| 144 | 24 | EKGAKVILASHLGRP | | | | | | | x | | | x | | | | | | | | | x | | |
| 145 | 24 | VPRLSELLGVEVVMA | x | x | | x | x | | x | | | x | | | x | x | | x | | | x | x | |
| 146 | 24 | GGVLLLENVRFYKEE | x | x | x | x | x | x | x | x | x | x | x | x | x | x | | x | x | x | x | x | |
| 147 | 24 | PEFAKKLASVADLYV | x | x | | x | x | | x | x | | x | x | | x | x | | x | x | | x | x | |
| 148 | 24 | KFLRPSVAGFLMQKE | | | | x | x | | x | | | x | | | x | x | | x | | | x | x | x |
| 149 | 24 | VAGFLMQKELDYLVG | x | x | x | x | x | x | x | x | x | x | x | x | x | x | x | x | x | x | x | | |
| 150 | 24 | KELDYLVGAVANPKK | x | x | | x | x | x | x | x | | x | x | x | x | | | x | | | x | | |
| 151 | 24 | KIGVIESLLAKVDIL | x | | | x | x | | x | | | x | x | | x | x | | x | x | | x | | |
| 152 | 24 | GMIFTFYKAQGKAVG | x | x | | x | | | x | x | | x | | | x | | | x | | | x | x | |
| 153 | 24 | GVSLLLPTDVVVADK | x | | | x | x | x | x | | | x | x | | x | x | | x | | | x | | |
| 154 | 26 | VELVAVNDPFITTDY | x | x | | x | x | | x | x | | x | x | x | x | x | x | x | x | x | | | |
| 155 | 26 | DYMTYMFKYDTVHGQ | x | x | x | x | x | | x | x | | x | x | | x | x | x | x | x | x | | | |
| 156 | 26 | GGAKKVIISAPSKDA | x | x | x | x | x | | x | x | x | x | x | x | x | x | x | x | x | x | | | |
| 157 | 26 | YTSDITIVSNASCTT | x | x | | | | | | | | | | | | | | | | | | | |
| 158 | 26 | KVINDRFGIVEGLMT | x | x | x | x | x | x | x | x | x | x | x | x | x | x | x | x | x | x | x | | |
| 159 | 26 | FGIVEGLMTTVHAMT | x | x | x | x | x | x | x | | | x | | | x | x | x | x | x | | | | |
| 160 | 26 | GGRAASFNIIPSSTG | x | x | x | x | x | x | x | x | x | x | x | x | x | x | x | x | x | x | | | |
| 161 | 26 | ALNDNFVKLVSWYDN | x | x | x | x | x | x | x | x | x | x | x | x | x | x | x | x | x | | | | |
| 162 | 27 | LQHISGVILFEETLY | x | | | | | | x | | | x | x | | x | | | x | x | | x | | |
| 163 | 27 | YEAGARFAKWRAVLK | x | x | x | x | x | | x | x | | x | x | | x | x | x | x | x | | x | | |
| 164 | 27 | GLARYAIICQENGLV | x | x | x | x | x | x | x | x | x | x | x | x | x | x | x | x | x | x | x | x | |
| 165 | 27 | RCAYVTEVVLAACYK | | | | | | | x | x | | x | x | | x | x | | | | | x | | |
| 166 | 27 | WFLSFSFGRALQQST | x | x | | x | x | | x | x | | x | x | | x | x | | x | x | | x | | |
| 167 | 28 | VVDTNLESPNDIVPE | x | x | | | | | x | | | x | | | | | | | | | | | |
| 168 | 29 | EKHFKYVILGGGVAA | | | | x | | | x | x | | x | | | | | | | | | | | |
| 169 | 29 | TEKGIELILSTEIVK | x | x | | x | x | | x | | | x | x | | x | x | | | | | x | | |
| 170 | 29 | GGGYIGLELSAALKL | x | | | x | | | x | x | | x | x | | | | | | | | | | |
| 171 | 29 | LKLNNFDVTMVYPEP | x | | | | | | | | x | x | | | | | | | | | | | |
| 172 | 29 | MPRLFTAGIAHFYEG | x | | | x | | | x | x | | x | x | x | x | | | x | | | | | |
| 173 | 29 | HFYEGYYASKGINIV | | | | | | | | | | x | x | | | | | | | | | | |
| 174 | 29 | VYAIGDVASFPMKLY | | | | x | | | x | | | x | | | | | | | | | | | |
| 175 | 29 | DYLPYFYSRSFDIAW | x | | | | | | | | | | | | | | | x | | | | | |
| 176 | 30 | RDAHYLRGLLPPAIV | | | | x | | | x | | | | | | x | | | | | | | | |
| 177 | 30 | MHNLRQYTVPLQRYI | | | | | | | x | | | x | | | | | | | | | | | |
| 178 | 30 | VPLQRYIAMMDLQER | | | | x | x | | x | x | | x | x | | x | | | x | | | | | |
| 179 | 30 | ERLFYKLLIDNVEEL | x | | | x | x | x | x | x | x | x | x | x | x | x | x | x | x | | | | |
| 180 | 30 | EELLPVVYTPVVGEA | x | x | | x | x | | x | x | | x | x | | x | x | | x | x | | | | |
| 181 | 30 | RSIQVIVVTDGERIL | x | | | x | x | | x | | | x | | | x | x | | x | x | | | | |
| 182 | 30 | GEKVLVQFEDFANHN | x | | | x | x | x | x | x | x | x | x | x | x | x | x | x | x | x | | | |
| 183 | 30 | FDLLAKYSKSHLVFN | | | | x | | | x | | | x | | | | | | | | | | | |
| 184 | 30 | VFNDDIQGTASVVLA | x | x | x | x | x | x | x | x | x | x | x | x | x | x | x | x | x | x | x | | |
| 185 | 30 | SVVLAGLLAALKVIG | | | | | | | x | | | x | | | | | | | | | | | |
| 186 | 30 | TGIAELIALEMSKHT | x | | | x | x | | x | x | | x | x | | x | x | | x | x | | | | |
| 187 | 30 | CRKKIWLVDSKGLLV | x | | | x | | | x | | | x | | | x | | | | | | | | |
| 188 | 30 | EEAYTWTKGTAVFAS | | | | | | | | | | | | | | | | x | | | | | |
| 189 | 30 | GFGLGVVISGAIRVH | x | | | x | | | x | | | x | | | x | | | x | x | | | | |
| 190 | 30 | VISGAIRVHDDMLLA | x | x | | x | | | x | x | x | x | x | | x | x | | x | x | | | | |
| 191 | 30 | HDDMLLAASEALAEQ | x | x | x | x | x | | x | x | | x | x | x | x | x | | x | x | | | | |
| 192 | 30 | FPPFTNIRKISANIA | x | | | x | | | x | | | x | | | x | | | x | x | | | | |
| 193 | 30 | IRKISANIAAKVAAK | x | x | | x | x | x | x | x | | x | x | | x | x | | x | x | | | | |
| 194 | 31 | VEHKGQVDLVTETDK | | | | x | x | | x | x | | x | x | | x | x | | x | x | | | | |
| 195 | 31 | TDKACEDLIFNHLRK | | | | | | | | | | | | | x | | | | | | | | |
| 196 | 32 | IEIDSLFEGIDFYST | x | x | | x | x | | x | x | | x | x | | x | x | | x | x | | x | | |
| 197 | 32 | IDFYSTITRARFEEL | x | x | x | x | x | x | x | x | x | x | x | x | x | x | x | x | x | x | x | | |
| 198 | 32 | IPKVQQLLQDFFNGK | x | x | x | x | x | x | x | x | x | x | x | x | x | x | x | x | x | x | | | |
| 199 | 32 | EAVAYGAAVQAAILS | x | x | x | x | x | x | x | x | x | x | x | x | x | x | x | x | x | x | x | | |
| 200 | 32 | VQDLLLLDVTPLSLG | x | x | x | x | x | x | x | x | x | x | x | x | x | x | x | x | x | x | x | | |
| 201 | 33 | LAWNCERCRKGESKK | x | | | x | | | x | | | x | | | x | | | | | | | | |
| 202 | 34 | VRVKILFTALCHTDV | x | | | x | | | x | | | x | | | x | x | | x | x | | | | |
| 203 | 34 | MCDLLRINTDRGVMI | x | x | x | x | x | x | x | x | | x | x | x | x | x | | x | x | | | | |
| 204 | 34 | KPIFHFVGTSTFSEY | x | x | x | x | | | x | x | | x | x | | x | | | x | | | x | | |
| 205 | 34 | VGTSTFSEYTVMHVG | x | x | | x | x | | x | | | x | x | | x | x | | x | x | | | | |
| 206 | 34 | VAIFGLGAVGLAAAE | x | x | x | x | x | x | x | x | x | x | x | x | x | x | | x | x | | | | |
| 207 | 34 | GAVGLAAAEGARIAG | x | x | x | x | | | x | x | x | x | x | x | x | x | x | x | x | x | | | |
| 208 | 34 | GNINAMIQAFECVHD | | | | x | x | | x | | | x | | | x | | | | | | | | |
| 209 | 34 | LKGTFFGNFKPRTDL | x | | | x | | | x | x | | x | x | | x | x | | x | | | | | |
| 210 | 34 | KFITHSVTFSEINKA | x | | | x | | | | | | x | | | x | x | | x | | | x | | |
| 211 | 34 | VTFSEINKAFDLMAK | x | | | | | | | | | | | | | | | | | | x | | |
| 212 | 35 | ALRWNLQMGHSVLPK | x | | | x | | | x | x | | x | x | | x | x | | x | x | | x | | |
| 213 | 35 | DDLLAKFSEIKQTRL | | | | x | | | | | | | | | | | | | | | x | | |
| 214 | 36 | QDFKKVNEIYAKYFP | x | x | | x | x | | x | | | x | | | x | x | | x | x | | | | |
| 215 | 36 | NEIYAKYFPSPAPAR | x | x | | x | x | | x | x | x | x | x | x | x | x | x | x | x | x | | | |
| 216 | 36 | YFPSPAPARSTYQVA | x | x | | x | x | | x | x | x | x | x | x | x | x | x | x | x | | | | |
| 217 | 36 | ARSTYQVAALPLDAR | x | x | x | x | | | x | x | x | x | x | | x | x | | x | | | | | |
| 218 | 36 | LPLDARIEIECIAAL | x | x | x | | | | x | x | | x | | | x | | | x | x | | | | |
| 219 | 38 | GWYHLFYQYNPEGAV | | | | x | x | | x | | | x | | | x | | | x | | | | | |
| 220 | 38 | SRDLIHWRHLPLAMV | | | | x | | | x | x | | x | x | | x | | | | | | | | |
| 221 | 38 | LNMLYTGSTNASVQV | | | | x | | | x | | | x | | | | | | | | | | | |
| 222 | 38 | EAFSVRVLVDHSIVE | | | | | | | | | | | | | x | | | | | | | | |
| 223 | 39 | GAFTGEVSAEMLANL | x | x | x | x | | | x | x | | x | x | | x | x | | x | | | | | |
| 224 | 39 | VSAEMLANLGIPWVI | x | x | | | | | x | | | x | x | | x | x | | x | x | | | | |
| 225 | 39 | GESSEFVGDKVAYAL | x | | | | | | x | x | | x | | | | | | | | | x | | |
| 226 | 39 | GDKVAYALAQGLKVI | x | x | | x | | | x | | | x | | | x | | | x | | | x | | |
| 227 | 39 | DWTNVVIAYEPVWAI | x | | | x | x | | x | x | | x | x | | | | | | | | | | |
| 228 | 39 | IAYEPVWAIGTGKVA | x | x | x | x | x | x | x | x | | x | x | x | x | x | x | x | x | x | | | |
| 229 | 39 | LKPEFIDIINAATVK | x | | | x | | | | | | | | | x | | | x | | | | | |
| 230 | 40 | VWQHDRVEIIANDQG | x | x | x | x | x | x | x | x | x | x | x | x | x | x | x | x | x | x | x | | |
| 231 | 40 | VEIIANDQGNRTTPS | x | x | x | x | x | x | x | x | x | x | x | x | x | x | x | x | x | x | x | | |
| 232 | 40 | TTPSYVAFTDSERLI | x | x | | x | x | | x | x | x | x | x | x | x | x | | x | x | x | | | |
| 233 | 42 | EEKQFAAEEISSMVL | x | x | x | x | x | | x | x | x | x | x | x | x | x | x | x | x | | | | |
| 234 | 42 | SSMVLIKMREIAEAF | x | x | | x | x | x | x | x | | x | x | | x | x | | x | x | | | | |
| 235 | 42 | SIKNAVVTVPAYFND | x | x | x | x | x | | x | x | x | x | x | | x | x | | x | x | | x | | |
| 236 | 42 | GVIAGLNVLRIINEP | x | x | | x | x | | x | x | | x | x | | x | x | | x | x | x | | | |
| 237 | 42 | VLRIINEPTAAAIAY | x | x | x | x | x | x | x | x | | x | x | | x | x | | x | x | x | | | |
| 238 | 43 | FAWSLLDNFEWRMGF | | | | x | | | | | | | | | x | | | x | | | | | |
| 239 | 44 | IELWQVKSGTLFDNI | x | x | | x | x | | x | x | x | x | x | x | x | | | x | | | | | |
| 240 | 47 | EDVAVSLAKYTAELS | | | | | | | x | | | x | | | | | | x | | | | | |
| 241 | 47 | DSNYKLAVDGLLSKV | | | | | | | | | | x | | | x | x | | x | | | x | | |
| 242 | 47 | PPPQRITFTFPVIKS | x | | | | | | x | | | x | | | x | | | | | | | | |
| 243 | 48 | APWLLTVGASTSDRR | | | | x | | | x | | | x | | | | | | | | | | | |
| 244 | 49 | ELRKTYNLLDAVSRH | x | x | | x | x | x | x | x | | x | x | | x | x | x | | | | x | | x |
| 245 | 49 | QVYPRSWSAVMLTFD | x | x | | x | x | x | x | x | x | x | x | | x | x | | | | | x | x | |
| 246 | 49 | AVMLTFDNAGMWNVR | x | x | x | x | x | x | x | x | x | x | x | x | x | x | x | | | | x | x | x |
| 247 | 49 | GEQLYISVISPARSL | x | x | | x | | | x | x | | x | x | | x | | | | | | x | | |
| 248 | 50 | LKSIKAFASGILVPK | | | | x | | | | | | x | | | x | | | | | | | | |
| 249 | 51 | PESKVFYLKMKGDYH | x | | | x | x | | x | x | | x | x | | x | x | | | | | x | | |
| 250 | 51 | MNSYKAAQDIALADL | | | | x | | | x | x | | | | | x | | | x | | | x | | |
| 251 | 51 | APTHPIRLGLALKIS | x | | | x | | | x | | | x | | | x | | | x | | | | | |
| 252 | 53 | WSEIQTLKPNLIGPF | | | | | | | x | | | x | | | | | | | | | x | | |
| 253 | 53 | KFMTLAGFLDYAKAS | | | | | | | x | | | x | | | x | | | | | | | | |
| 254 | 53 | NISGILIGIEHAAYL | | | | | | | x | | | x | | | x | | | | | | | | |
| 255 | 53 | AAYLATRGLDVVDAV | | | | | | | x | | | x | | | x | | | | | | x | | |
| 256 | 53 | GLVTEFPSTAAAYFR | x | x | | x | | | x | x | | x | x | | x | | | | | | x | | |
| 257 | 54 | NIVVNVFNQLDQPLL | x | x | x | x | | | x | x | x | x | | | x | | | | | | x | | |
| 258 | 54 | IGSFFYFPSIGMQRT | x | | | x | x | | x | x | | x | x | | x | | | | | | x | x | x |
| 259 | 54 | GYGLISVVSRLLIPV | x | x | | x | x | x | x | x | x | | | | x | x | | | | | | | |
| 260 | 54 | VVSRLLIPVPFDPPA | x | x | x | x | x | x | x | x | x | x | x | x | x | x | x | | | | x | | |
| 261 | 55 | SVFKKFPKFRRVLVI | | | | x | | | x | | | x | | | x | | | | | | | | |
| 262 | 56 | KELGGKILRQPGPLP | | | | | | | x | | | x | | | | | | | | | | | |
| 263 | 56 | ILRQPGPLPGLNTKI | | | | x | | | x | | | x | | | x | | | x | | | | | |
| 264 | 56 | KIASFLDPDGWKVVL | x | | | x | | | x | | | x | | | x | | | x | | | x | | |
| 265 | 56 | GWKVVLVDHADFLKE | x | | | | | | x | x | | x | x | | | | | | | | | | |
| 266 | 57 | RLVCLRVHPTFTLLH | x | | | x | | | x | | | x | | | x | x | | x | | | | | |
| 267 | 58 | YFVEAYLNNPLVQKA | x | x | | x | x | | x | x | x | x | x | | x | x | | | | | | | |
| 268 | 58 | VQKAIHANTALNYPW | x | x | | x | x | | x | x | | x | x | | x | x | | | | | | | |
| 269 | 58 | LYSGDLDAMVPVTAS | x | x | x | x | x | x | x | x | | x | x | x | x | x | x | | | | | | |
| 270 | 59 | VKKIVTVLNEAEVPS | | | | | | | | | | x | x | | x | x | | | | | | | |
| 271 | 59 | EDAVEVVVSPPFVFL | x | | | | | | x | | | x | x | | x | x | | x | | | | | |
| 272 | 59 | ALLRPDFAVAAQNCW | | | | | | | | | | | | | x | | | | | | x | | |
| 273 | 59 | GAFTGEISAEMLVNL | x | | | x | x | | x | x | | x | x | | x | x | x | x | x | x | | | |
| 274 | 59 | ISAEMLVNLQVPWVI | | | | x | | | x | | | | | | x | x | | x | | | x | | |
| 275 | 59 | ADKVAYALAQGLKVI | x | | | | | | | | | | | | | | | | | | x | x | |
| 276 | 59 | TTMEVVAAQTKAIAE | x | | | | | | | | | | | | x | x | | | | | x | | |
| 277 | 59 | WTNVVLAYEPVWAIG | x | x | | x | x | x | x | x | x | x | x | x | x | | | x | x | | x | | |
| 278 | 60 | EDSHFVVELTYNYGV | x | x | | x | x | | x | x | x | x | x | x | x | x | | x | x | | | | |
| 279 | 60 | RAIKFYEKAFGMELL | | | | | | | | | | | | | | | | x | | | | | |
| 280 | 60 | NPQYKYTIAMMGYGP | x | x | | x | | | | | | x | x | | x | x | | x | x | | | | |
| 281 | 60 | KNAVLELTYNYGVKE | x | x | | | | | | | | x | | | x | x | | x | | | | | |
| 282 | 60 | DGWKSVFVDNLDFLK | x | | | x | | | | | | x | | | | | | x | | | | | |
| 283 | 62 | FTVQEMVALSGAHTL | x | | | x | | | | | | | | | x | | | x | | | x | | |
| 284 | 64 | YSDLYQLAGWAVEV | x | | | x | | | x | x | | x | x | | x | x | | x | x | | x | | |
| 285 | 64 | DHLRQVFGKQMGLSD | | | | x | x | | x | | | x | | | x | | | x | | | | | |
| 286 | 65 | FSCDSAYQVTYIVRG | | | | x | x | | x | x | | x | x | | x | x | | x | | | x | | |
| 287 | 65 | YQVTYIVRGSGRVQV | | | | x | | | x | | | x | | | x | x | | | | | x | | |
| 288 | 65 | GMEWFSIITTPNPIF | | | | x | x | | x | x | | x | x | | x | x | x | x | x | x | | | |
| 289 | 65 | GKTSVWKAISPEVLE | | | | | | | | | | | | | | | | x | | | | | |
| 290 | 69 | ARSALTISVLRISSM | | | | | | | | | | | | | x | | | | | | | | |
| 291 | 69 | ISVLRISSMPFSVYH | x | | | | | | | | | | | | | | | | | | | | |
| 292 | 72 | KHLIYVTGWSVYTEI | x | | | x | | | x | x | | x | x | | x | x | | x | | | | | |
| 293 | 72 | TGWSVYTEITLLRDA | | | | x | | | x | | | x | | | | | | | | | | | |
| 294 | 72 | SEGVRVLMLVWDDRT | x | | | x | x | | x | x | | x | x | | x | x | x | x | x | x | | | |
| 295 | 72 | DDSGSIVQDLQISTM | | | | x | | | | | | x | | | x | | | x | | | | | |
| 296 | 72 | LQISTMFTHHQKIVV | x | | | x | x | x | | | | x | x | x | x | x | | x | x | x | | | |
| 297 | 72 | PVAWDVLYNFEQRWR | | | | x | x | x | x | x | x | x | x | | x | | | x | | | | | |
| 298 | 72 | AWNVQLFRSIDGGAA | x | x | | x | x | | x | | | x | x | | x | x | | | | | | | |
| 299 | 72 | DAYICAIRRAKSFIY | x | | | x | | | x | | | x | | | x | | | x | | | x | | |
| 300 | 72 | IRRAKSFIYIENQYF | x | x | | x | x | | x | x | | x | x | | x | x | | x | x | | | | |
| 301 | 72 | FIYIENQYFLGSSYC | x | x | | x | x | | x | x | | x | x | | x | x | | | | | | | |
| 302 | 72 | RFTVYVVVPMWPEGI | x | | | x | x | x | x | x | | x | x | | x | x | | | | | | | |
| 303 | 72 | DYLKAQQNRRFMIYV | | | | x | x | | x | | | x | | | | | | | | | x | | |
| 304 | 72 | FMIYVHTKMMIVDDE | x | x | | x | x | | x | x | | x | x | | x | x | | x | x | | | | |
| 305 | 72 | IVDDEYIIVGSANIN | x | x | x | x | x | x | x | x | x | x | x | x | x | x | x | x | x | | | | |
| 306 | 72 | GQVHGFRMALWYEHL | x | | | x | x | | x | x | x | x | x | x | x | | | x | | | | | |
| 307 | 72 | LPGVEFFPDTQARIL | | | | | | | x | | | x | | | | | | x | | | | | |
| 308 | 73 | EPPQFIALFQPMVIL | x | | | | | | x | | | x | | | x | | | | | | | | |
| 309 | 73 | QQQWAAKVAEFLKPG | x | | | | | | x | | | x | | | | | | x | x | | | | |
| 310 | 73 | RASALAALSSAFNPS | | | | | | | x | | | x | | | x | x | | | | | | | |
| 311 | 73 | SQRAAAVAALSNVLT | x | x | x | x | x | | x | x | x | x | x | x | x | x | | | | | | | |
| 312 | 76 | NIWADDLAASLSTLE | | | | | | | | | | | | | x | | | | | | x | | |
| 313 | 76 | MVEYFGEQLSGFAFT | | | | x | x | x | x | x | x | x | x | x | x | x | x | x | x | x | | | |
| 314 | 76 | LSGFAFTANGWVQSY | | | | x | x | x | x | x | x | x | x | x | x | x | | x | x | | x | | |
| 315 | 76 | NPMTVFWSKMAQSMT | | | | x | | | x | | | x | | | x | | | | | | x | x | |
| 316 | 76 | KDKLVVSTSCSLMHT | | | | x | | | | | | x | x | | x | x | | x | x | | | | |
| 317 | 76 | TSCSLMHTAVDLVNE | | | | x | | | x | x | | x | x | | x | x | | x | x | | x | | |
| 318 | 76 | TKLDSEIKSWLAFAA | | | | x | | | x | x | | x | x | | x | x | | x | x | | x | | |
| 319 | 76 | IKSWLAFAAQKVVEV | | | | x | x | | x | x | x | x | x | x | x | x | x | x | x | x | | | |
| 320 | 77 | EGPLMLYVSKMIPAS | | | | x | x | | x | x | | x | x | | x | x | x | x | x | x | | | |
| 321 | 77 | KGRFFAFGRVFAGRV | | | | x | | | x | | | x | | | x | | | x | | | | | |
| 322 | 77 | GNTVALVGLDQFITK | | | | x | x | | x | | | x | x | | x | x | | x | x | | | | |
| 323 | 77 | VGLDQFITKNATLTG | | | | x | x | | x | | | x | | | x | | | | | | | | |
| 324 | 77 | PIRAMKFSVSPVVRV | | | | x | x | x | x | x | x | x | x | x | x | x | x | x | x | x | | | |
| 325 | 77 | FMGGAEIIVSPPVVS | x | | | x | x | | x | | | x | | | x | | | x | | | | | |
| 326 | 77 | SPPVVSFRETVLDKS | x | | | | | | | | | | | | | | | x | | | x | | |
| 327 | 77 | NKHNRLYMEARPLEE | x | | | x | x | | x | x | x | x | x | x | x | x | | x | x | x | x | | |
| 328 | 77 | PTARRVIFASQLTAK | x | x | | x | | | x | | | | | | x | x | | x | | | | | |
| 329 | 77 | AKPRLLEPVYLVEIQ | x | x | x | x | x | | x | x | x | x | x | | x | x | | x | x | x | | | |
| 330 | 77 | EPVYLVEIQAPEGAL | x | x | | x | | | x | x | | x | | | x | | | x | x | | | | |
| 331 | 77 | PLYNIKAYLPVIESF | x | x | | x | x | | x | x | x | x | x | | x | x | | x | x | | | | |
| 332 | 77 | LPVIESFGFSATLRA | | | | | | | x | x | | x | | | | | | x | | | x | | |
| 333 | 77 | FGFSATLRAATSGQA | x | | | x | | | x | x | | x | x | | x | | | x | x | | x | | |
| 334 | 79 | EVYEARLTKFKYLAG | | | | x | | | | | | | | | | | | | | | x | | |
| 335 | 83 | GMTGMLWETSLLDPE | | | | x | x | | x | | | x | x | | | | | x | | | x | | |
| 336 | 83 | PEGLLWLLLTGKVPT | x | x | | x | x | x | x | x | x | x | x | x | x | x | | x | | | x | | |
| 337 | 83 | QFTTGVMALQVESEF | x | x | | x | | | x | | | x | | | x | | | | | | | | |
| 338 | 83 | DPKMLELMRLYITIH | | | | | | | | | | | | | x | | | | | | x | | |
| 339 | 83 | ALSDPYLSFAAALNG | x | x | x | x | x | x | x | x | x | x | x | x | x | x | x | x | x | x | x | | |
| 340 | 83 | LSFAAALNGLAGPLH | x | x | x | x | x | x | x | x | x | x | x | x | x | x | x | x | x | x | x | | |
| 341 | 83 | PLHGLANQEVLLWIK | x | x | x | x | x | x | x | x | x | x | x | x | x | x | | x | x | x | | | |
| 342 | 83 | QEVLLWIKSVMEETG | | | | | | | x | | | x | | | | | | | | | | | |
| 343 | 83 | QLKEYVWKTLKSGKV | x | | | | | | | | | | | | x | x | | x | x | | x | | |
| 344 | 83 | EDPLFQLVSKLYEVV | x | x | | x | | | x | | | | | | x | x | | x | x | | x | | |
| 345 | 83 | LVSKLYEVVPGILTE | x | x | | | | | | | | | | | x | x | | x | x | | x | | |
| 346 | 83 | SGVLLNHFGLVEARY | | | | | | | x | | | x | | | x | x | | x | | | x | | |
| 347 | 83 | TVLFGVSRSMGIGSQ | | | | x | | | | | | | | | x | | | x | x | | x | | |
| 348 | 83 | GSQLIWDRALGLPLE | x | x | | x | x | | x | x | | x | x | | x | x | | x | x | x | x | | |
| 349 | 84 | GPVTILNWSFVRNDQ | | | | x | x | x | x | x | x | x | x | x | x | x | x | x | x | x | x | | |
| 350 | 84 | PRFETCYQIALAIKK | | | | x | x | | x | x | | x | x | | x | x | | | | | | | |
| 351 | 84 | GIQVIQIDEAALREG | x | x | | x | x | | x | x | | x | x | | x | x | | x | x | | | | |
| 352 | 84 | EHAFYLDWAVHSFRI | x | x | x | x | x | x | x | x | x | x | x | x | x | x | | x | x | | x | | |
| 353 | 84 | FNDIIHSIINMDADV | x | x | x | x | x | x | x | x | | x | x | | x | x | | x | x | | x | | |
| 354 | 84 | SDEKLLSVFREGVTY | x | x | | x | x | | x | x | | x | x | | x | x | | x | x | | | | |
| 355 | 84 | VNKMLAVLDTNILWV | x | | | x | | | x | | | x | | | x | | | x | | | x | | |
| 356 | 84 | TRKYAEVMPALTNMV | | | | | | | x | | | x | | | | | | | | | | | |
| 357 | 86 | TREENVYMAKLAEQA | x | | | x | x | | x | x | | x | x | | x | x | | x | x | | | | |
| 358 | 86 | YEEMVEFMEKVAKTA | | | | x | x | | x | x | | x | x | | x | x | | | | | | | |
| 359 | 86 | EERNLLSVAYKNVIG | x | x | x | x | x | x | x | x | x | x | x | x | x | x | x | x | x | x | | | |
| 360 | 86 | AYKNVIGARRASWRI | x | x | x | x | x | x | x | x | x | x | x | x | x | x | x | x | x | x | | | |
| 361 | 86 | RRASWRIISSIEQKE | x | x | x | x | x | x | x | x | x | x | x | x | x | x | x | x | x | x | | | |
| 362 | 86 | SKICDGILKLLDSHL | x | | | x | | | x | | | x | | | | | | x | | | | | |
| 363 | 86 | AESKVFYLKMKGDYH | x | x | | x | x | x | x | x | x | x | x | x | x | x | x | x | x | x | | | |
| 364 | 86 | GDYHRYLAEFKAGAE | x | x | | x | x | | x | x | | x | x | | x | x | | x | | | | | |
| 365 | 86 | NTLVAYKSAQDIALA | | | | x | x | | x | | | x | x | | x | | | x | | | | | |
| 366 | 86 | LPTTHPIRLGLALNF | x | x | | x | x | | x | x | | x | x | | x | x | | x | x | | | | |
| 367 | 86 | IRLGLALNFSVFYYE | x | x | x | x | x | x | x | x | x | x | x | x | x | x | x | x | x | x | | | |
| 368 | 86 | LNFSVFYYEILNSPD | x | x | x | x | x | x | x | x | x | x | x | x | x | x | x | x | x | x | | | |
| 369 | 86 | YKDSTLIMQLLRDNL | x | x | x | x | x | x | x | x | x | x | x | x | x | x | x | x | x | x | | | |
| 370 | 86 | IMQLLRDNLTLWTSD | x | x | x | x | x | x | x | x | x | x | x | x | x | x | x | x | x | x | x | | |
| 371 | 87 | ADGILFGFPTRFGMM | x | | | x | | | x | x | | x | x | | x | x | | x | | | | | |
| 372 | 89 | QTYYLSMEYLQGRAL | | | | x | x | x | x | | | x | | | x | | | x | x | x | x | | |
| 373 | 89 | RLAACFLDSMATLNL | | | | x | x | | | | | | | | x | | | x | x | | | | |
| 374 | 89 | LRYRYGLFKQRIAKE | | | | x | x | x | x | | | | | | x | | | | | | x | | |
| 375 | 89 | FSPWEIVRHDVVYPV | | | | x | | | | | | | | | | | | x | | | x | | |
| 376 | 89 | GEVLNALAYDVPIPG | | | | x | | | | | | | | | x | | | x | | | x | x | |
| 377 | 89 | IPGYKTKNAISLRLW | | | | x | | | | | | | | | x | x | | x | | | | | |
| 378 | 89 | AEDFNLFQFNDGQYE | | | | x | | | | | | | | | x | | | x | x | x | | | |
| 379 | 89 | EGKLLRLKQQFFLCS | | | | x | x | | | | | | | | x | x | | x | x | | | | |
| 380 | 89 | LKQQFFLCSASLQDI | | | | x | x | x | | | | x | | | x | x | x | x | x | x | | | |
| 381 | 89 | PTLAIPELMRLLMDE | x | x | x | x | x | x | | | | | | | x | x | x | x | x | | | | |
| 382 | 89 | PQKPVVRMANLCVVS | | | | x | x | | | | | | | | x | x | x | x | x | x | | | |
| 383 | 89 | ILKEELFADYVSIWP | | | | x | | | | | | | | | x | | | x | x | | | | |
| 384 | 89 | PRRWLRFCNPELSEI | | | | x | | | | | | | | | x | | | x | | | x | | |
| 385 | 89 | IKRIHEYKRQLMNIL | | | | x | | | x | | | x | x | | x | | | x | x | | x | x | |
| 386 | 89 | YKRQLMNILGAVYRY | | | | x | x | | x | | | | | | x | | | x | x | | x | x | |
| 387 | 89 | LGAVYRYKKLKEMSA | | | | x | | | | | | | | | | | | | | | x | x | x |
| 388 | 89 | GKAFATYTNAKRIVK | | | | x | x | x | x | | | | | | x | x | x | x | x | x | x | x | |
| 389 | 89 | KRIVKLVNDVGAVVN | | | | x | x | x | | | | | | | x | x | x | x | x | x | x | x | |
| 390 | 89 | VNKYLKVVFIPNYNV | | | | | | | | | | | | | x | | | x | | | x | | |
| 391 | 89 | VFIPNYNVSVAEVLI | | | | x | x | | | | | | | | x | | | x | | | x | x | x |
| 392 | 89 | FLVGYDFPSYIDAQA | | | | | | | | | | | | | x | | | x | | | | | |
| 393 | 89 | KRWIKMSILNTAGSG | | | | x | | | | | | x | x | | x | | | x | | | x | x | x |
| 394 | 90 | PDLPYDYGALEPAIS | x | x | x | x | x | x | x | x | x | x | x | x | x | x | | x | x | | x | x | |
| 395 | 90 | HAYYLQYKNVRPDYL | x | x | x | x | x | x | x | x | x | x | x | x | x | x | x | x | x | x | x | x | |
| 396 | 90 | PDYLTNIWKVVNWKY | x | | | x | | | x | | | x | | | x | | | x | | | x | x | |
| 397 | 91 | HYKGSSFHRVIPGFM | x | x | | x | x | x | x | x | | x | x | | x | x | x | x | x | | x | x | x |

“x” indicates that a matching sequence with zero, less than 2 or less than 3 mismatches to the (Phl p) sequence is found in the non-grass pollen species

[0241] Table 2 shows wild type full length sequences of NTGA's detected by combined transcriptomic analysis and Mass spectrometry analysis of grass pollen extracts.

TABLE 2

| SEQ | | |
|---|---|---|
| ID | NTGA | |
| No | No | Phl p wild type sequence (SEQ ID Nos: 398-443) |
| 398 | 1 | MAATIQSVKARQIFDSRGNPTVEVDVCCSDGTFARAAVPSGASTGVYEALELRDGGSDYLGK |
| | | GVLKAVDNVNSIIGPALIGKDPTEQTELDNFMVHQLDGTKNEWGWCKQKLGANAILAVSLAV |
| | | CKAGALVKKIPLYQHIANLAGNKQLVLPVPAFNVINGGSHAGNKLAMQEFMILPTGASSFKEA |
| | | MKMGVEVYHNLKSVIKKKYGQDATNVGDEGGFAPNIQENKEGLELLKTAIEKAGYTGKVVIG |
| | | MDVAASEFYGEKDQTYDLNFKEENNDGSQKISGDSLKNVYKSFVSEYPIVSIEDPFDQDDWV |
| | | HYAKMTEEIGEQVQIVGDDLLVTNPTRVAKAIAEKSCNALLLKVNQIGSVTESIEAVKMSKRA |
| | | GWGVMTSHRSGETEDTFIADLAVGLSTGQIKTGAPCRSERLAKYNQLLRIEEELGAAAVYAGL |
| | | KFRAPVEPY |
| 399 | 2 | MASPALISDTDQWKALQAHVGAIHKTHLRDLMADADRCKALTAEFEGVFLDYSRQQATTETV |
| | | DKLFKLAEAAKLKEKIAKMFNGDKINSTENRSVLHVALRAPRDAVINSDGVNVVPEVWAVIDK |
| | | IKQFSETFRSGSWVGATGKPLTNVVSVGIGGSFLGPLFVHTALQTDPEAAESAKGRQLRFLAN |
| | | VDPVDVARSIKDLDPETTLVVVVSKTFTTAETMLNARTIKEWIVSSLGPQAVSKHMIAVSTNLK |
| | | LVKEFGIDPNNAFAFWDWVGGRYSVCSAVGVLPLSLQYGFPIVQRFLEGASSIDNHFRTASFE |
| | | KNIPVLLGLLSVWNVSFLGYPARAILPYSQALEKLAPHIQQLSMESNGKGVSIDGVPLPYEAGEI |
| | | DFGEPGTNGQHSFYQLIHQGRVIPCDFIGVIKSQQPVYLKGETSNHDELMSNFFAQPDALASR |
| | | KTPAPLRSENVSENLIPHKTFKGNRPSLSFLLSSLSAYEIGQLLAIYEHRIAVQGFIWGINSFDQ |
| | | WGVELGKSLASQVRKQLHASRMEGKPVEGFNPSSASLLARYLAVEPSTPYDTTVLPKV |
| 400 | 3 | MDDHKEHKEKEHTGGNPEVNEEEEEDEEAKRAVLLGPQVPLKEQLELDKDDESLRRWKEQLL |
| | | GQVDTEQLGETAEPEVKVVDLTILSPDRPDLVLPIPFVADEKGYAFALKDGSTYSFRFSFIVSNN |
| | | IVSGLKYTNTVWKTGVRVENQKMMLGTFSPQPEPYIYVGEEETTPAGIFARGSYSAKLKFVDD |
| | | DGKVYLEMSYYFEIRKDWPTGQ |
| 401 | 4 | YIKLMKTIFDFESIKKLLASPKFSFCFDGLHGVAGAYAKRMFVDELGASESSLLNCVPKEDFGG |
| | | GHPDPNLTYAKELVERMGLGKSSSNVEPPEFGAAADGDADRNMVLGKRFFVTPSDSVAIIAAN |
| | | AVQSIPYFASGLKGVARSMPTSAALDVVAKNLNLKFFEVPTGWKFFGNLMDAGMCSVCGEES |
| | | FGTGSDHIREKDGIWAVLAWLSIIAYKNKDNLGGDKLVSVEDIVLQHWATYGRHYYTRYDYE |
| | | NVDAEAAKELMANLVKMQSALSDVNKLIKEIQPDVAEVVSADEFEYKDPVDGSVSKHQGIRY |
| | | LFGDGSRLVFRLSGTGSVGATIRIYIEQYEKDSSKTGRESSDALSPLVDVALKLSKIKEYTGRS |
| | | APTVIT |
| 402 | 5/64 | MAAKCYPTVSDEYLAAVAKARRKLRGLIAEKNCAPLMLRIAWHSAGTFDVATKTGGPFGTMRC |
| | | PAELAHGANAGLDIAVRLLEPIKEQVPILSYADFYQLAGVVAVEITGGPEVPFHPGRQDKTEPPP |
| | | EGRLPDATLGSDHLRQVFTAQMGLSDQDIVALSGGHTLGRCHKERSGFEGAWTANPLIFDNS |
| | | YFTELLTGEKEGLLQLPTDKTLLTDPAFRPLVEKYAADEDAFFADYAEAHLKLSELGFGE |
| 403 | 6 | MADEKLAKLREAVAGLPQISDNEKSGFISLVSRYLSGEEEHIEWPKIHTPTDEVVVPYDTVDAP |
| | | PEDLEATKALLDKLAVLKLNGGLGTTMGCTGPKSVIEVRNGFTFLDLIVLQIESLNKKYGSNVPL |
| | | LLMNSFNTHEDTLKIVEKYANSSIDIHTFNQSQYPRVVADEFLPWPSKGKTDKDGWYPPGHG |
| | | DIFPSLMNSGKLDLLLSQGKEYVFIANSDNLGAIVDMKILNHLIHKQNEYCMEVTPKTLADVKG |
| | | GTLISYEGRVQLLEIAQVPDAHVDEFKSIEKFKIFNTNNLWVNLKAIKRLVEADALKMEIIPNPK |
| | | EVDGVKVLQLETAAGAAIRFFDHAIGINVPRSRFLPVKATSDLQLVQSDLYTLVDGFVTRNSAR |
| | | TDPSNPSIELGPEFKKVGSFLGRFKSIPSIVELDSLKVSGDVWFGSGIVLKGKVTITAKPGVKLE |
| | | IPDGAVLENKDINGAEDL |
| 404 | 7 | MAFEKIKVANPIVEMGDEMTRVFWQSIKEKLIFPFLDLDIKYYDLGVLHRDATDDKVTVEAAEA |
| | | TLKYNVAIKCATITPDEDRVKEFNLKQMWRSPNGTIRNIINGTVFREPIICKNVPKLVPGWTKPI |
| | | CIGRHAFGDQYRATDAVLKGPGKLRLVFEGKDETVDLEVFNFTGAGGVALAMYNTDESIQGFA |
| | | EASMAIAYEKKWPLYLSTKNTILKKYDGRFKDIFQAVYEADWKSKYEAAGIWYEHRLIDDMVA |
| | | YALKSEGGYVWACKNYDGDVQSDFLAQGFGSLGLMTSVLMCPDGKTIEAEAAHGTVTRHFR |
| | | VHQKGGETSTNSIASIFAWTRGLAHRAKLDDNARLLDFTQKLEDACVGTVESGKMTKDLALL |
| | | VHGSSKVTRGDYLNTEEFIDAVAAELQSRLAAN |
| 405 | 8 | FEGCLAKSYKSEKSDKSATYDYSANIECEKEPPKPLYGGGILTGAEAPAPVSAGGKKLLMAKSK |
| | | SAPAKGSTLKVELEKDTHYTLSAWLQLSKSTGDVKAILVTPDGNFNTAGMLVVQSGCWTMLK |
| | | GGATSFAAGKGELFFETNVTAELMVDSMSLQPFSFEEWKSHRHESIAKERKKKVKITVHGSD |
| | | GKVLPDAELSLERVAKGFPLGNAMTKEILDIPEYEKWFTSRFTVATMENEMKWYSTEYDQNQE |
| | | LYEIPDKMLALAEKYNISVRGHNVFWDDQSKQMDWVSKLSAPQLKKAMEKRMKNVVSRYAG |
| | | KLIHWDVLNENLHYSFFEDKLGKDASAEVFKEVAKLDDKPILFMNEYNTIEEPNDAAPLPTKYL |
| | | AKLKQIQSYPGNSKLKYGIGLESHFDTPNIPYVRGSLDTLAQAKVPIWLTEIDVKKGPKQVEYL |
| | | EEVMREGFAHPGVKGIVLWGAWHAKECYVMCLTDKNFKNLPVGDVVDKLITEWKAVPEDAK |
| | | TDDKGVFEAELFHGEYNVTVKHKS |
| 406 | 9 | MAQLQETYACSPATERGRGILLGGDAKTDTIVYCAGRTVFFRRLDAPLDAWTYTEHAYPTTVA |
| | | RISPNGEWVASADVSGCVRVWGRNGDRALKAEFRPISGRVDDLRWSPDGLRIVVSGDGKG |
| | | KSLVRAFMWDSGSTVGDFDGHSKRVLSCDFKPTRPFRIVTCGEDFLANYYEGPPFKFKHSIRD |
| | | HSNFVNCIRYSPDGSKFITVSSDKRGLIYDGKTGDKIGELSSEDSHTGSIYAVSWSADSKQVL |
| | | TVSADKTAKVWDIMEDASGKVNRTLVCTGIGGVDDMLVGCLWQNDHLVTVSLGGTFNVFSA |
| | | SNPDKEPVSFAGHLKTVSSLTYFPQSNPRTMLSTSYDGVIIRWIQGVGYGGRLIRKNNTQIKC |
| | | FVAAEEELITSGYDNMVFRIPLNGDQCGDAESVDVGGQPNALNIAVQQPEFALITTDSAIVLLH |
| | | KSTVTSTTKVSYTITSSAVSPDGTEAIVGAQDGKLRIYSISGDTLTEEAVLERHRGAITSIHYSP |
| | | DVSMFASADANREAVAWDRATREIKLKNMLFHTARINCLAWSPDSRLVATGSIDTCAIIYDVD |
| | | KPASSRITIKGAHLGGVHGLTFADNDTLVTAGEDACVRVWKLV |
| 407 | 10 | MVFSVTKKDTKPFDGQKPGTSGLRKKVTVFQQPHYLANFVQSTFNALPADQVKGATIVVSGD |
| | | GRYFSKDAVQIITKMAAANGVRRVWVGQDSLLSTPAVSAIIRERIAADGSKATGAFILTASHN |
| | | PGGPTEDFGIKYNMGNGGPAPESVTDKIFSNTTTITEYLIAEDLPDVDISALGVTTFTGPEGPFD |
| | | VDVFDSATDYIKLMKTIFDFESIKKLLASPKFSFCFDGLHGVAGAYAKRMFVDELGASESSLLN |
| | | CVPKEDFGGGHPDPNLTYAKELVERMGLGKSSSNVEPPEFGAAADGDADRNMVLGKRFFVTP |
| | | SDSVAIIAANAVQSIPYFASGLKGVARSMPTSAALDVVAKNLNLKFFEVPTGWKFFGNLMDAG |
| | | MCSVCGEESFGTGSDHIREKDGIWAVLAWLSIIAYKNKDNLGGDKLVSVEDIVLQHWATYGR |
| | | HYYTRYDYENVDAEAAKELMANLVKMQSALSDVNKLIKEIQPDVAEVVSADEFEYKDPVDGSV |
| | | SKHQGIRYLFGDGSRLVFRLSGTGSVGATIRIYIEQYEKDSSKTGRESSDALSPLVDVALKLSK |
| | | IKEYTGRSAPTVIT |
| 408 | 11 | MATSWTLPDHPTLPKGKTVAVIVLDGWGEASADQYNCIHRAETPVMDSLKNGAPEKWTLVKA |
| | | HGTAVGLPSDDDMGNSEVGHNALGAGRIFAQGAKLVDAALASGKIWEAEGFNYIKESFAEGT |
| | | LHLIGLLSDGGVHSRLDQVQLLVKGASERGAKRIRLHILTDGRDVLDGSSVGFVETLENDLAQ |
| | | LREKGVDAQVASGGGRMYVTMDRYENDWDVVKRGWDAQVLGEAPYKFKSALEAVKTLRAE |
| | | PKANDQYLPAFVIVDESGKSVGPIVDGDAVVTFNFRADRMVMLAKALEFADFDKFDRVRVPKI |
| | | KYAGMLQYDGELKLPNKFLVSPPLIERTSGEYLVKNGVRTFACSETVKFGHVTFFWNGNRSGY |
| | | FDETKEEYIEIPSDSGITFNEQPKMKALEIAEKTRDAILSGKFDQVRINLPNGDMVGHTGDIEA |
| | | TVVACKAADEAVKIVLDAVEQVGGIYLVTADHGNAEDMVKRNKSGQPALDKSGSIQILTSHTL |
| | | QPVPVAIGGPGLHPGVKFRSDINTPGLANVAATVMNLHGFQAPDDYETTLIEVAD |
| 409 | 13 | MDEEYDVIVLGTGLKECILSGLLSVDGLKVLHMDRNDYYGGESTSLNLTKIWKRFKGSEATPD |
| | | HLGVSKEYNVDMVPKFMMANGALVRVLIRTSVTKYLNFKAVDGSFVYNNGKIHKVPATDVEAL |
| | | KSNLMGLFEKRRARKFFIYVQDYEEEDPKSHEGLDLHKVTTREVISKYGLEDDTVDFIGHALAL |
| | | HRDDNYLDEPAIDTVKRMKLYAESLARFQGGSPYIYPLYGLGELPQAFARLSAVYGGTYMLNKP |
| | | ECKVEFDESGKAFGVTSEGETAKCKKVVCDPSYLPDKVTKVGRVARAICIMKHPIPDTKDSHS |
| | | VQIILPKKQLKRKSDMYVFCCSYAHNVAPKGKFIAFVSTEAETDKPEIELKPGIDLLGPVEETFF |
| | | DIYDRYEPANAPEEDNCFVTNSYDATTHFETTVKDVLALYSKITGKELDLSVDLNAASAGESE |
| 410 | 19 | GVVATTDAVEACTGVNVAVMVGGFPRKEGMERKDVMSKNVSTYKSQASALEAHAAPNCKVL |
| | | VVANPANTNALILKEFAPSIPEKNISCLTRLDHNRALGQVSERLNVQVSDVKNVLIWGNHSSS |
| | | QYPDVNHATVKTSSGEKPVRELVQDDEWLNGPFIATVQQRGAAIIKARKLSSALSAASSACD |
| | | HIRDWVLGTPEGTFVSMGVYSDGSYGVPAGLIYSFPVTCSGGEWTIVQGLPIDEFSRKKMDA |
| | | TAQELSEEKALAYSCL |
| 411 | 20 | MAASSRRASQLLGSAASRFLHSRGYAAAAAAPSPAVFVDKSTRVICQGITGKNGTFHTEQATE |
| | | YGTNMVGGVTPKKGGTEHLGLPVFNSVAEAKAETKANASVIYVPPPFAAAAIMEALEAELDLVV |
| | | CITEGIPQHDMVKVKAALNRQSKTRLIGPNCPGIIKPGECKIGIMPGYIHKPGRIGIVSRSGTLT |
| | | YEAVFQTTAVGLGQSTCVGMGGDPFNGTNFVDCLEKFVADPQTEGIVLIGEIGGTAEEDAAAF |
| | | TQASKTDKPVVAFIAGLTAPPGRRMGHAGAIVSGGKGTAQDKIKALREAGVTVVESPAKIGST |
| | | MFEIFKQRGMVE |
| 412 | 22 | MALPNQGTVDYPSFKLVIVGDGGTGKTTFVKRHLTGEFEKKYEPTIGVEVHPLDFTTNCGKIRF |
| | | YCWDTAGQEKFGGLRDGYYTHGQCAIIMFDVTSRLTYKNVPTWHRDLCRVCENIPIVLCGNKV |
| | | DVKNRQVKAKQVTFHRKKNLQYYEISAKSNYNFEKPFLYLARKLAGDANIHFVEAVALKPPEVT |
| | | FDLAMQQQH |
| 413 | 24 | MATKRSVGTLGEADLKGKKVFLRADLNVPLDDAQKITDDTRIRASIPTIKFLLEKGAKVILASHL |
| | | GRPKGVTPKFSLKPLVPRLSELLGVEVVMANDCIGEEVEKLAAALPEGGVLLLENVRFYKEEEK |
| | | NDPEFAKKLASVADLYVNDAFGTAHRAHASTEGVTKFLRPSVAGFLMQKELDYLVGAVANPKK |
| | | PFAAIVGGSKVSSKIGVIESLLAKVDILILGGGMIFTFYKAQGKAVGKSLVEEDKLELATSLIETA |
| | | KAKGVSLLLPTDVVVADKFAPDAESKTVSADAIPDGWMGLDVGPDSIKTFSEALDTTKTVIWN |
| | | GPMGVFEFEKFAAGTDAIAKQLADLTGKGVTTIIGGGDSVAAVEKAGLADKMSHISTGGGAS |
| | | LELLEGKPLPGVLALDEA |
| 414 | 26 | GVFTDKDKAAAHMKGGAKKVVISAPSKDAPMFVVGVNEDKYTSDVNIVSNASCTTNCLAPLA |
| | | KIINDNFGIVEGLMTTVHSITATQKTVDGPSSKDWRGGRAASFNIIPSSTGAAKAVGKVLPEL |
| | | NGKLTGMSFRVPTVDVSVVDLTVRIEKAASYEDIKKAIKAASEGNLKGIMGYVEEDLVSTDFIG |
| | | DSRSSIFDAKAGIALNDNFVKLVSWYDNEWGY |
| 415 | 27 | MSAYCGKYKDELIKNAAYIGTPGKGILAADESTGTIGKRFASINVENVEDNRRALRELLFTTPG |
| | | ALQHISGVILFEETLYQSSKAGKPFVDILKENNVLPGIKVDKGTVELAGTDKETTTQGHDDLGK |
| | | RCAKYYEAGARFAKWRAVLKIGPNEPSQLSIDQNAQGLARYAIICQENGLVPIVEPEILVDGPH |
| | | DIERCAYVTEVVLAACYKALNDQHVLLEGSLLKPNMVTPGSDAKKVAPEVIAEYTVRTLQRTVP |
| | | PAVPAIVFLSGGQSEEEATVNLNAMNKLQTKKPWFLSFSFGRALQQSTLKAWSGKEENVEKA |
| | | QKAFLVRCKANSEATLGTYKGDATLGEGASESLHVKDYKY |
| 416 | 29 | MASEKHFKYVILGGGVAAGYAAREFAKQGVQPGELAIISKESVAPYERPALSKGYLFPQNAARL |
| | | PGFHTCVGSGGEKLLPEWYTEKGIELILSTEIVKADLASKTLTSAAGATFTYETLLIATGSSTIKL |
| | | TDFGVQGAEANNILYLRDINDADKLVAAMQAKKDGKAVVVGGGYIGLELSAALKLNNFDVTM |
| | | VYPEPWCMPRLFTAGIAHFYEGYYASKGINIVKGTVASGFDADANGDVAVVKLKDGRVLDANI |
| | | VIVGVGGRPLTGLFKGQVDEEKGGLKTDTFFETSVAGVYAIGDVASFPMKLYNEPRRVEHVDH |
| | | ARKSAEQAVKAIKAKESGETVAEYDYLPYFYSRSFDIAWQFYGDNVGESVLFGDNDPAAAKAK |
| | | FGTYWVKDGKVVGVFLEGGSADENQATAKVARAQPLVAANLGELGKEGLDFAAKI |
| 417 | 30 | MAGGGVEDVYGEDRATEEQFVTPWSFSVASGHSLLRDPRHNKGLAFSEAERDAHYLRGLLPP |
| | | AIVSQEHQEKKIMHNLRQYTVPLQRYIAMMDLQERNERLFYKLLIDNVEELLPVVYTPVVGEAC |
| | | QKYGSTYRRPQGLYISLKDKGKVLEVLKNWPERSIQVIVVTDGERILGLGDLGCQGMGIPVGK |
| | | LSLYTALGGVRPSACLPITIDVGTNNQTLLDDEYYIGLKQRRATGEEYHELLQEFMNAVKQNYG |
| | | EKVLVQFEDFANHNAFDLLAKYSKSHLVFNDDIQGTASVVLAGLLAALKVIGGGLADQTYLFLG |
| | | AGEAGTGIAELIALEMSKHTDLPLDDCRKKIWLVDSKGLLVESRKESLQHFKKPFAHEHEPLTT |
| | | LLEAVQSLKPTVLIGTSGVGKTFTQEVVEAMASFNEKPVIFSLSNPTSHSECTAEEAYTWTKGT |
| | | AVFASGSPFDPVEYEGKTYVPGQSNNAYVFPGFGLGVVISGAIRVHDDMLLAASEALAEQVSQ |
| | | ENFDKGLIFPPFTNIRKISANIAAKVAAKAYDLGLASRLPRPDDLVKYAESCMYTPLYRSYR |
| 418 | 32 | MAPIKIGINGFGRIGRLVARVALQCPDVELVAVNDPFITTDYMTYMFKYDTVHGQWKHHDVKV |
| | | KDAKTLLFGEKEVAVFGCRNPEEIPWGAAGADYVVESTGVFTDKDKAAAHIKGGAKKVIISAP |
| | | SKDAPMFVCGVNEKEYTSDITIVSNASCTTNCLAPLAKVINDRFGIVEGLMTTVHAMTATQKT |
| | | VDGPSSKDWRGGRAASFNIIPSSTGAAKAVGKVLPVLNGKLTGMAFRVPTVDVSVVDLTVRL |
| | | EKAATYEQIKAAIKEESEGNLKGILGYVDEDLVSTDFQGDSRSSIFDAKAGIALNDNFVKLVS |
| | | WYDNEWGYSTRVVDLIRHIHATK |
| 419 | 34 | MSFSWICACVRAAAVAWEAGKPLSIEEVEVAPPQAMEVRVKILFTALCHTDVYFWEAKGQTPV |
| | | FPRIFGHEAGGIVESVGEGVTDVAPGDHVLPVFTGECKECRHCKSAESNMCDLLRINTDRGV |
| | | MISDGKSRFSIDGKPIFHFVGTSTFSEYTVMHVGCVAKINPEAPLDKVCVLSCGISTGLGASIN |
| | | VAKPPKGSTVAIFGLGAVGLAAAEGARIAGASRIIGIDLNANRFEEARKFGCTEFVNPKDHTKP |
| | | VQEVLAEMTDGGVDRSVECTGNINAMIQAFECVHDGWGVAVLVGVPHKDAEFKTHPMNFLN |
| | | ERTLKGTFFGNFKPRTDLPNVVEMYMKKELEVEKFITHSVTFSEINKAFDLMAKGEGIRCIIRME |
| | | H |
| 420 | 39_ | MAPRKFFVGGNWKCNGASDDVKKIVTVLNEAEVPSEDAVEVVVSPPFVFLQQAKALLRPDFA |
| | 59 | VAAQNCWVRKGGAFTGEISAEMLVNLQVPWVILGHSERRALLSESNDFVADKVAYALAQGLK |
| | | VIACIGETLEQREAGTTMEVVAAQTKAIAEKISDWTNVVLAYEPVWAIGTGKVASRAQAQEVH |
| | | DGLRKWLHANVGPAVAESTRIIYGGSVNGANCKELAAQPDLDGFLVGGASLKPEFVDIIKSAT |
| | | VKSSS |
| 421 | 43 | GCRAGGNSATEPYIAGHHLLLAHAAAVKIYRDKYQPAQQGKIGILLDFVWYEPLTYNTEDEFAA |
| | | HRAREFTLGWFMHPITYGHYPETMQRLVADRLPNFTDEQTRLLQGSADIVGVNHYTTYYAKNH |
| | | ENLTHMSYANDWQVQLVYERNGIPIGKQGYSKWLYVVPWGFYKAVMHVKDKYRNPLMIIGE |
| | | NGIDQSGSDTLPHALYDKFRIDYFDQYLHELKRATDDGARVTGYFAWSLLDNFEWRMGFTSK |
| | | FGIVYVDRKTFTRYPKDSTRWFRKV |
| 422 | 43 | KTNKDGVDYYHRLINYMLANKITPYVVLYHYDLPEVLNNQYNGWLSPRVVPDFAYFADFCFK |
| 423 | 43 | LTRHSFPKGFVFGTASSAYQVEGNALQYGRGPCIWDTFLKFPGATPDNATANVTVDEYHRYM |
| 424 | 47 | MATDAAAPAAASKWNLLTFDTEEDVAVSLAKYTAELSGKFAAERGAFTVVLSGGTLIDTLRKL |
| | | AEPPYLETVQWSKWHVFWVDERVVPKDHVDSNYKLAVDGLLSKVPIPTDQVYAINDTLSAEG |
| | | AAADYETVLKQLVKNGVLAMSTATGFPRFDLMLLGMGPDGHLASLFPGHPLLNENQKWVTHI |
| | | MDSPKPPPQRITFTFPVIKSSAYVAMVVTGPGEASAVKKVLSDDKTLP |
| 425 | 47 | DGHLASLFPGHPLLNENQKWVTHIMDSPKPPPQRITFTFPVIKSSAYVAMVVTGPGEASAVKK |
| | | VLSDDKTLPLLPTEMAILQDGEFTWFTDKQAVSMLQNK |
| 426 | 49/54 | STNVARAEDPYVFFEWHVTYGTKTVLGVPQKVILINGEFPGPRINCSSNNNIVVNVFNQLDQP |
| | | LLFTWNGIQHRKNSWQDGLPGTNCPVAPGTNFTYKWQPKDQIGSFFYFPSIGMQRTVGGYGL |
| | | ISVVSRLLIPVPFDPPADDLQVIIGDWYTKDHAVMASLLDAGKSFGRPAGVLINGRGGKDATN |
| | | PPMFTFEAGKTYRLRVCNVGIKSSLNFRIQGHDMRLVEMDGSHTLQDSYDSLDVHVGHCFSV |
| | | LVDADQKPADYLMVASTRFIADGSSASAVIRYAGSNTPPAANVPEPPAGWAWSLNQWRSFR |
| | | WNLTASAARPNPQGSYHYGQINITRTIKLMITRGHLDGKLKYGFNGVSHVDADTPLKLAEYFN |
| | | VSDQVFKYNQMGDAPPGVNGPMHVTPNVITAEFRTFIEVVFENPEKSMDSLHIDGYAFFAVG |
| | | MGPGKWKPELRKTYNLLDAVSRHSIQVYPRSWSAVMLTFDNAGMWNVRSNVWERHYLGEQ |
| | | LYISVISPARSLRDEYNFPENALRCGKVVGLPLPPSYLPA |
| 427 | 49/54 | MATTTTRGTAAAGGVLLLALLLLSTNVARAEDPYVFFEWHVTYGTKTVLGVPQKVILINGEFPG |
| | | PRINCSSNNNIVVNVFNQLDQPLLFTWNGIQHRKNSWQDGLPGTNCPVAPGTNFTYKWQPK |
| | | DQIGSFFYFPSIGMQRTVGGYGLISVVSRLLIPVPFDPPADDLQVIIGDWYTKDHAVMASLLDA |
| | | GKSFGRPAGVLINGRGGKDATNPPMFTFEAGKTYRLRVCNVGIKSSLNFRIQGHDMRLVEMD |
| | | GSHTLQDSYDSLDVHVGHCFSVLVDADQKPADYLMVASTRFIADGSSASAVIRYAGSNTPPA |
| | | ANVPEPPAGWAWSLNQWRSFRWNLTASAARPNPQGSYHYGQINITRTIKLMITRGHLDGKLK |
| | | YGFNGVSHVDADTPLKLAEYFNVSDQVFKYNQMGDAPPGVNGPMHVTPNVITAEFRTFIEVVF |
| | | ENPEKSMDSLHIDGYAFFAVGMGPGKWKPELRKTYNLLDAVSRHSIQVYPRSWSAVMLTFDN |
| | | AGMWNVRSNVWERHYLGEQLYISVISPARSLRDEYNFPENALRCGKVVGLPLPPSYLPA |
| 428 | 49/54 | TKDHAVMASLLDAGKSFGRPAGVLINGRGGKDATNPPMFTFEAGKTYRLRVCNVGIKSSLNF |
| | Fragment | RIQGHDMRLVEMDGSHTLQDSYDSLDVHVGHCFSVLVDADQKPADYLMVASTRFIADGSSA |
| | | SAVIRYAGSNTPPAANVPEPPAGWAWSLNQWRSFRWNLTASAARPNPQGSYHYGQINITRTI |
| | | KLMITRGHLDGKLKYGFNGVSHVDADTPLKLAEYFNVSDQVFKYNQMGDAPPGVNGPMHVTP |
| | | NVITAEFRTFIEVVFENPEKSMDSLHIDGYAFFAVGMGPGKWKPELRK |
| 429 | 51 | MSPAEPTREESVYMAKLAEQAERYEEMVEFMERVAKATGGAGPGEELSVEERNLLSVAYKNVI |
| | | GARRASWRIISSIEQKEEGRGNDAHATTIRSYRSKIEAELAKICDGILALLDSHLVPSAGAAES |
| | | KVFYLKMKGDYHRYLAEFKSGAERKEAAESTMNSYKAAQDIALADLAPTHPIRLGLALNFSVFY |
| | | YEILNSPDRACNLAKQAFDEAISELDSLGEESYKDSTLIMQLLRDNLTLWTSDTNEDGGDEIKE |
| | | APAPKESGD |
| 430 | 52 | MDACRLLLLLLLGLLGLLAPLASAQLSREFYKASCPDAEKIVAAVIEKKLKEDPGTAAGLLRLLFH |
| | | DCFANGCDASILIDPLSNQSAEKEAGPNISVRGFEVIDDIKKELEAKCPKTVSCADIVALGTRD |
| | | AVRISGGPAYEVPTGRRDSLVSNREEADNNLPGPDIPIPKLTSEFLSRGFTPEEMVVLLAGGHS |
| | | IGKVRCIFIEPDATPMDPGYQASISKLCDGPNRDTGFVNMDEHNPNVIDSSYFANVLAKKMPL |
| | | TVDRLLGLDSKTTPIIKNMLNKPNDFMPTFAKAMEKLSVLKVITGKDG |
| 431 | 53 | MDRNPVAKNAGKFMTLAGVLDYAKASNISGILIGIEHAAYLATRGLDVVDAVSNALIKSGYDK |
| | | ETKQQVFIQSEDPPVLSAFKKFPKFNRVFEIEFDIRDVSKPSVVEIKEFANAVKLRRSSAAQVD |
| | | GFYLTGFNAVVERLRDADIQVHVGVLKNEFMSLAFDYWADPMVEIATDTWSVLADGLVTEFP |
| | | STAAAYFRSPCSDIKRNMSYTIKPGEPGALVDMAAYGALPPAPPPAPVLEPADVHRQPLPLCPT |
| | | EPMFRTFRCRLPPKETGKNAEYTANLAADG |
| 432 | 56 | MARLLFPLPIAAAAVSASSIHLAASRFRLPVVSAARRGTLFGGRVAVRAPARLATRGVSAGAEA |
| | | GGSAARAGTVIGPEEALEWVKNDRRRLLHVVYRVGDLDKTIKFYTECLGMKLLRKRDIPEERY |
| | | TNAFLGYGPEDSHFVVELTYNYGVESYDIGSGFGHFGIAVEDVEKTVELIKAKGGTVTREPGPV |
| | | KGGKSVIAFIEDPDGYKFELIERGPTPEPLCQVMLRVGDLDRAIKFYEKAFGMELLRRKDNPQY |
| | | KYTIAMMGYGPEDKNAVLELTYNYGVKEYDKGNAYAQIAIGTDDVYKTAEVVRQNGGQITREP |
| | | GPLPGISTKITACTDPDGWKSVFVDNLDFLKELEE |
| 433 | 62 | MRRLSLILLAAAALLAAAVSAEPGPAPKLSPDFYSQTCPRAERIIAEVVQSKQMANPTTAAGVL |
| | | RVFFHDCFVSGCDASVLIAPTHYAKSEKDADINHSLPGDAFDAVVRSKLALELECPGVVSCAD |
| | | ILAIASRVLVTMTGGPRYPVPLGRKDSLSSNPAAPDVELPHSNFTVGRIIELFTAKGFTVQEMVA |
| | | LSGAHTLGFSHCQEFASRIYNYRDKGGKPAPFDPSMNPTYAKGLQAACQDYQKDPTIAAFNDI |
| | | MTPGKFDNMYYVNIERGLGLLSTDEDMWSDMRTKPFVQRYAANNTDFFEDFAKAIEKLSMYG |
| | | VKTGADGEIRRRCDAFNSGPNIQ |
| 434 | 65 | AMAVDLTPRQPTKAYGGDGGAYYEWSPAELPMLGVASIGAAKLSLAAGGMSLPSYSDSAKVA |
| | | YVLQGKGTCGIVLPEATKEKVVAIKEGDALALPFGVVTWWHNTPESSTELVVLFLGDTSKGHT |
| | | PGKFTNFQLTGATGIFTGFSTEFVARAWDLDQDAAASLVSTQPGTGIVKLAPGHKMPVARAED |
| | | RKGMALNCLEAKLDVDIPNGGRVVVLNTVNLPLVKEVGLGADLVRIDAHSMCSPGFSCDSAY |
| | | QVTYIVRGSGRVQVVGPDGKRVLETRIEGGSLFIVPRFHVVSKIADASGMEWFSIITTPNPIFS |
| | | HLAGKTSVWKAISPEVLEAAFNTTPEMEKLFRSKRLDSEIFFAPS |
| 435 | 73 | MSSAKQVLEPAFQGAGQKPGTEIWRIENFNPVPLPKSDYGKFYCGDSYIVLQTTCNKGGAYLF |
| | | DIHFWIGKDSSQDEAGTSAIKTVELDTMLGGRAVQHREPQGYESDKFLSYFKPCIIPLEGGFA |
| | | SGFKTPEEEKFETRLYICKGKRAIRVKEVPFARSSLNHDDVFILDTEKKIYQFNGANSNIQERAK |
| | | ALEVIQHLKDKYHEGVCDVAIVDDGKLQAESDSGEFWVVFGGFAPIGKKTVSDDDVILETSPT |
| | | KLYSINNGKLKLEDIVLTKSILENTKCFLLDCGSELFVWVGRVTQVDDRKAASAAVEEFIVKQN |
| | | RPKTTRVTQVIQGYENHTFKSLFESWPVSSTGNASTEEGRGKVAALLKKKGDVKGASKNSTP |
| | | VNEEVPPLLEGSGKLEVWCVDGSAKTALPKEDLGKFHSGDCYIVLYTYHSGEKREEFYLTYWI |
| | | GKDSVLEDQHMALQIATTIWNSMKGRPVLGRIYQGKEPPQFIALFQPMVILKGGISSGYKKSI |
| | | EENGLKDETYSGTGIALVHIHGTSIHNNKTLQVDAVSISLSSTDCFVLQSGNSMFTWIGNTSS |
| | | YEQQQWAAKVAEFLKPGASVKHCKEGTESSAFWSALGGKQNYTSKNATQDVLREPHLYTFSF |
| | | RNGKLEVTEVFNFSQDDLLTEDVMILDTHAEVFVWMGQCVDTKEKQTAFETGQKYVEHAVNF |
| | | EGLSPDVPLYKVSEGNEPCFFRTYFSWDNTRSVIHGNSFQKKLSLLFGMRSESGSKGSGDGG |
| | | PTQRASALAALSSAFNPSSQDKQSNDRPKSSGDGGPTQRASALAALSSSLNPSSKPKSPHSQ |
| | | SRSGQGSQRAAAVAALSNVLTAEGSTLSPRNDAEKTELAPSEFHTDQDAPGDEVPSEGERTE |
| | | PDVSQEETANENGGETTFSYDRLISKSTDPVRGIDYKRRETYLSDSEFETVFGVTKEEFYQQPR |
| | | WKQELQKRKADLF |
| 436 | 76 | MASHIVGYPRMGPKRELKFALESFWDGKSSAEDLEKVATDLRASIWKQMSEAGIKYIPSNTFS |
| | | YYDQVLDTTAMLGAVPDRYSWTGGEIGHSTYFSMARGNATVPAMEMTKWFDTNYHFIVPELG |
| | | PETKFSYASHKAVSEYKEAKALGVDTVPVLVGPVSYLLLSKAAKGVEKSFSLLSLLGGILPIYKE |
| | | VVAELKAAGASWIQFDEPTLVKDLAAHELAAFSSAYAELESSLSGLNVLIETYFADVPAESYKTL |
| | | TSLSGVTAYGFDLVRGTKTLDL- |
| | | LKSVGIPSGKYLFAGVVDGRNIWADDLAASLSTLESLEAIVGKDKLVVSTSCSLMHTAVDLVN |
| | | ETKLDSEIKSWLAFAAQKVVEVNALGKALVGLKDEAYFAANAAAQASRRSSPRVNNEEVQKA |
| | | AAALKGSDHRRATTVSARLDAQQKKLNLPVLPTTTIGSFPQTMDLRRVRREYKAKKISEEAYV |
| | | SAIKEEISKVVKIQEELDIDVLVHGEPERNDMVEYFGEQLSGFAFTANGWVQSYGSRCVKPPII |
| | | YGDVSRPNPMTVFWSKMAQSMTPRPMKGMLTGPV |
| 437 | 77 | QEVAGDVRMTDTRADEAERGITIKSTGISLYYEMSEESLASYKGDRDGNDYLINLIDSPGHVD |
| | | FSSEVTAALRITDGALVVVDCIEGVCVQTETVLRQALGERIRPVLTVNKMDRCFLELQVDGEEA |
| | | YQTFSRVIENANVIMATYEDALLGDVQVYPEKGTVAFSAGLHGWAFTLTNFAKMYASKFGVDE |
| | | SKMMERLWGENFFDPATKKWTSKNTGSGTCKRGFVQFCYEPIKQIIEICMNDQKDKLWPMLK |
| | | KLGVTMKNDEKDLMGKALMKRVMQAWLPASRALLEMMVYHLPSPSKAQRYRVENLYEGPLD |
| | | DVYANAIRNCDPEGPLMLYVSKMIPASDKGRFFAFGRVFAGRVATGMKVRIMGPNFVPGQKK |
| | | DLYTKSVQRTVIWMGKKQESVEDVPCGNTVALVGLDQFITKNATLTGEKEVDACPIRAMKFS |
| | | VSPVVRVAVQCKVASDLPKLVEGLKRLAKSDPMVLCSIEESGEHIIAGAGELHLEICLKDLQDD |
| | | FMGGAEIIVSPPVVSFRETVLDKSCRTVMSKSPNKHNRLYMEARPLEEGLPEAIDEGRIGPRDD |
| | | PKVRSKILSEEFGWDKDLAKKIWCFGPETTGPNMVVDMCKGVQYLNEIKDSVVAGFQWASK |
| | | EGALADENMRGICFEVCDVVLHTDAIHRGGGQVIPTARRVIFASQLTAKPRLLEPVYLVEIQAP |
| | | EGALGGIYGVLNQKRGHVFEEMQRPGTPLYNIKAYLPVIESFGFSATLRAATSGQAFPQCVFDH |
| | | WDVMNSDPLEVDSQSFNLVKEIRKRKGLKEQMTPLSDFEDKL |
| 438 | 86 | MSTAEATREENVYMAKLAEQAERYEEMVEFMEKVAKTADVGELTVEERNLLSVAYKNVIGARR |
| | | ASWRIISSIEQKEESRGNEAYVASIKEYRTRIETELSKICDGILKLLDSHLVPSATAAESKVFYLK |
| | | MKGDYHRYLAEFKAGAERKEAAENTLVAYKSAQDIALADLPTTHPIRLGLALNFSVFYYEILNSP |
| | | DRACNLAKQAFDEAIAELDSLGEESYKDSTLIMQLLRDNLTLWTSDNADEGGDEIKEASKPEG |
| | | EGH |
| 439 | 86/51 | MSPAEPTREESVYMAKLAEQAERYEEMVEFMERVAKATGGAGPGEELSVEERNLLSVAYKNVI |
| | | GARRASWRIISSIEQKEEGRGNDAHATTIRSYRSKIEAELAKICDGILALLDSHLVPSAGAAES |
| | | KVFYLKMKGDYHRYLAEFKSGAERKEAAESTMNSYKAAQDIALADLAPTHPIRLGLALNFSVFY |
| | | YEILNSPDRACNLAKQAFDEAISELDSLGEESYKDSTLIMQLLRDNLTLWTSDTNEDGGDEIKE |
| | | APAPKESGD |
| 440 | 87 | MAVKVYVVYYSMYGHVGKLAEEIKKGASSVEGVEVKVWQVPEILSEEVLGKMGAPPKTDVPII |
| | | SPQELAEADGILFGFPTRFGMMASQMKAFFDATGGLWREQSLAGKPAGVFFSTGTQGGGQE |
| | | TTPLTAVTQLTHHGMVFVPVGYTFGAKMFDMEKVQGGSPYGAGTFAGDGSRWPSEMELEHA |
| | | FHQGKYFAGIAKKLKGS |
| 441 | 89 | MSAADKVKPAASPAAEDPAAIAGNISYHAHYSPHFSPLAFGPEPAYFATAESVRDHLLQRWND |
| | | TYLHFHKTDPKQTYYLSMEYLQGRALTNAVGNLGITGAYAEAVKKFGYELEALAGQERDMALG |
| | | NGGLGRLAACFLDSMATLNLPAWGYGLRYRYGLFKQRIAKEGQEEIAEDWLEKFSPWEIVRH |
| | | DVVYPVRFFGHVEILPDGRRKSAGGEVLNALAYDVPIPGYKTKNAISLRLWDAKASAEDFNLF |
| | | QFNDGQYESAAQLHSRAQQICAVLYPGDATEEGKLLRLKQQFFLCSASLQDIIFRFKERKSDR |
| | | VSGKWSEFPSKVAVQMNDTHPTLAIPELMRLLMDEEGLGWDEAWDVTNKTVAYTNHTVLPE |
| | | ALEKWSQSVMRKLLPRQMEIIEEIDKRFREMVISTRKDMEGKLDSMSVLDNSPQKPVVRMAN |
| | | LCVVSAHTVNGVAELHSNILKEELFADYVSIWPKKFQNKTNGITPRRWLRFCNPELSEIVTKWL |
| | | KTDQWTSNLDLLTGLRKFADDEKLHAEWAAAKLASKKRLAKHVLDATGVTIDPTSLFDIQIKR |
| | | IHEYKRQLMNILGAVYRYKKLKEMSAEEKQKVTPRTVMVGGKAFATYTNAKRIVKLVNDVGAV |
| | | VNNDPDVNKYLKVVFIPNYNVSVAEVLIPGSELSQHISTAGMEASGTSNMKFSLNGCVIIGTLD |
| | | GANVEIREEVGEDNFFLFGAKADQVAGLRKDRENGLFKPDPRFEEAKQYIRSGTFGTYDYTPLL |
| | | DSLEGNSGFGRGDYFLVGYDFPSYIDAQARVDEAYKDKKRWIKMSILNTAGSGKFSSDRTID |
| | | QYAKEIWGITANPVP |
| 442 | 91 | MAANPRVFFDVTIGGAPAGRIVMELYADVVPKTAENFRALCTGEKGVGKMGKPLHYKGSSFH |
| | | RVIPGFMCQGGDFTAGNGTGGESIYGAKFADENFVKKHTGPGVLSMANAGPGTNGSQFFLCT |
| | | AKTAWLDGKHVVFGQVVEG |
| 443 | 91 | AANPRVFFDVTIGGAPAGRIVMELYADVVPKTAENFRALCTGEKGVGKMGKPLHYKGSSFHRV |
| | | IPGFMCQGGDFTAGNGTGGESIYGAKFADENFVKKHTGPGVLSMANAGPGTNGSQFFLCTAK |
| | | TAWLDGKHVVFGQVVEGMDVVKAVEKVGSQSGRCSKPVVIADCGQL |

[0242] Table 3 shows conserved regions of NTGA's shown in Table 2 that are conserved across a grass pollen (Phl p), a weed pollen (Amb a and/or Amb p) and a tree pollen (Que a and/or Bet v). The conserved regions are denoted GWT.

TABLE 3
Table 3 Conserved regions (GWT) (SEQ ID Nos: 444-664)

| SEQ | | | |
|---|---|---|---|
| ID | NTGA | | |
| NO | ID | The conserved Phl p sequence is shown | |
| 444 | 1 | a | TIQSVKARQIFDSRGNPTVEVDVC |
| 445 | 1 | b | SDGTFARAAVPSGASTGVYEALELRDGGSDYLGKGVLKAVDNVNSIIGPALIGKDPTEQT |
| 446 | 1 | c | DNFMVHQLDGTKNEWGWCKQKLGANAILAVSLAVCKAGALVKKIPLYQHIANLAGNKQLV |
| | | | LPVPAFNVINGGSHAGNKLAMQEFMILPTGASSFKEAMKMGVEVYHNLKSVIKKKYGQDAT |
| | | | NVGDEGGFAPNIQENKEGLELLKTAIEKAGYTGKVVIGMDVAASEFYGE |
| 447 | 1 | d | DQTYDLNFKEENNDGSQKISG |
| 448 | 1 | e | LKNVYKSFVSEYPIVSIEDPFDQDDWVHY |
| 449 | 1 | f | FVSEYPIVSIEDPFDQDDWVHYAKMTEEIGEQVQIVGDDLLVTNPTRVAKAIAEKSCNALLL |
| | | | KVNQIGSVTESIEAVKMSKRAGWGVMTSHRSGETEDTFIADLAVGLSTGQIKTGAPCRSER |
| | | | LAKYNQLLRIEEELGAAAVYAG |
| 450 | 2 | a | MFNGEKINSTENRSVLHVALRAPRD |
| 451 | 2 | b | SVGIGGSFLGPLFVHTALQTDPEAAESAKGRQLRFLANVDPVDVARSI |
| 452 | 2 | c | DLDPETTLVVVVSKTFTTAETMLNARTIKEWI |
| 453 | 2 | d | LVKEFGIDPNNAFAFWDWVGGRYSVCSAVGVLPLSLQYGFPIV |
| 454 | 2 | e | ASFEKNIPVLLGLLSVWNVSFLGYPARAILPYSQALEKLAPHIQQLSMESNGKGVSIDGVPLP |
| | | | YEAGEIDFGEPGTNGQHSFYQLIHQGRVIPCDFIGVIKSQQPVYLKGETVSNHDELMSNFFA |
| | | | QPDALAYGKTPEQLRSENVS |
| 455 | 2 | f | LIPHKTFKGNRPSLSFLL |
| 456 | 2 | g | SLSAYEIGQLLAIYEHRIAVQGFIWGINSFDQWGVELGKSLASQVRKQLHASR |
| 457 | 3 | a | LKEQLELDKDDESLRRWKEQLLGQVDT |
| 458 | 3 | b | NIVSGLKYTNTVWKTGVRV |
| 459 | 3 | c | EETTPAGIFARGSYSAKLKFVDDD |
| 460 | 4 | a | KLMKTIFDFESIKKL |
| 461 | 4 | b | FCFDGLHGVAGAYAKRMFVDELGASESSLLNCVPKEDFGGGHPDPNLTYAKELVERMGLG |
| 462 | 4 | c | VEPPEFGAAADGDADRNMVLGKRFFVTPSDSVAIIAANAVQSIPYFASGLKGVARSMPTSA |
| | | | ALDVVAKNLNLKFFEVPTGWKFFGNLMDAGMCSVCGEESFGTGSDHIREKDGIWAVLAWL |
| | | | SIIAYKNK |
| 463 | 4 | d | KLVSVEDIVLQHWATYGRHYYTRYDYENVDAEAAKELMA |
| 464 | 4 | e | DVAEVVSADEFEYKDPVDGSVSKHQGIRYLFGDGSRLVFRLSGTGSVGATIRIYIEQYEKDS |
| | | | SKTGRES |
| 465 | 4 | f | DALSPLVDVALKLSK |
| 466 | 5/64 | a | KLRGLIAEKNCAPLMLRIAWHSAGTFDVATKTGGPFGTMR |
| 467 | 5/64 | b | AELAHGANAGLDIAVRLLEPIKEQVPILSYADFYQLAGVVAVEITGGPEVPFHPGRQDKTEPP |
| | | | PEGRLPDATLGSDHLR |
| 468 | 5/64 | c | AQMGLSDQDIVALSGGHTLGRCHKERSGFEGAWTANPLIFDNSYFTELLTGEKEGLLQLPT |
| | | | DKTLLTDPAFRPLVEKYAADEDAFFADYAEAHLKLSELGFGE |
| 469 | 5/64 | d | KLRGLIAEKNCAPLMLRIAWHSAGTFDVATKTGGPFGTMR |
| 470 | 5/64 | e | AELAHGANAGLDIAVRLLEPIKEQVPILSYADFYQLAGVVAVEITGGPEVPFHPGRQDKTEPP |
| | | | PEGRLPDATLGSDHLR |
| 471 | 5/64 | f | AQMGLSDQDIVALSGGHTLGRCHKERSGFEGAWTANPLIFDNSYFTELLTGEKEGLLQLPT |
| | | | DKTLLTDPAFRPLVEKYAADEDAFFADYAEAHLKLSELGFGEA |
| 472 | 5/64 | g | PFHPGREDKPQPPPEGRLPDATKGSDHLRQVFGKQMGLSDQDIVALSGGHTLGRCHKERS |
| | | | GFEGPWTKNPLKFDN |
| 473 | 5/64 | h | DKTLLTDPVFRPLVEKYAADEKAFFEDY |
| 474 | 6 | a | TKALLDKLAVLKLNGGLGTTMGCTGPKSVIEVRNGFTFLDLIVLQIESLNKKYGSNVPLLLMN |
| | | | SFNTHEDTLKIVEKY |
| 475 | 6 | b | IHTFNQSQYPRVVAD |
| 476 | 6 | c | PSKGKTDKDGWYPPGHGDIFPSLMNSGKLDLLLSQGKEYVFIANSDNLGAIVDMKILNHL |
| 477 | 6 | d | KQNEYCMEVTPKTLADVKGGTLISYEGRVQLLEIAQVPDAHVDEFKSIEKFKIFNTNNLWVN |
| | | | LKAIKRLVEADALKMEIIPNPKEVDGVKVLQLETAAGAAIRFFDHAIGINVPRSRFLPVKATS |
| | | | DLQLVQSDLYT |
| 478 | 6 | e | ARTDPSNPSIELGPEFKKVGSFLGRFKSIPSIVELDSLKVSGDVWFGSG |
| 479 | 6 | f | PGVKLEIPDGAVLENKDI |
| 480 | 7 | a | GDEMTRVFWQSIKEKLIFPFLDLDIKYYDLGVLHRDATDDKVTVEAAEATLKYNVAIKCATIT |
| | | | PDEDRVKEF |
| 481 | 7 | b | LKQMWRSPNGTIRNIINGTVFREPIICKNVPKLVPPhl pKPICIGRHAFGDQYRATDAVLKG |
| 482 | 7 | c | DLEVFNFTGAGGVALAMYNTDESIQGFAEASM |
| 483 | 7 | d | IAYEKKWPLYLSTKNTILKKYDGRFKDIFQAVYEADWKSKYEAAGIWYEHRLIDDMVAYALK |
| | | | SEGGYVWACKNYDGDVQSDFLAQGFGSLGLMTSVLMCPDGKTIEAEAAHGTVTRHFRVH |
| | | | QKGGETSTNSIASIFAWTRGLAHRAKLDDNARLLDFTQKLE |
| 484 | 7 | e | ACVGTVESGKMTKDLALLVHG |
| 485 | 7 | f | RGDYLNTEEFIDAVAAELQ |
| 486 | 9 | a | ETYACSPATERGRGIL |
| 487 | 9 | b | EHAYPTTVARISPNGEWVASADVSGCVR |
| 488 | 9 | c | RIVVSGDGKGKSLVRAFMWDSGSTVG |
| 489 | 9 | d | FDGHSKRVLSCDFKPTRPFRIVTCGEDFLANYYEGPPFKFKHSIRDHSNFVNCIRYSPDGSK |
| | | | FITVSSDKRGLIYD |
| 490 | 9 | e | GELSSEDSHTGSIYAVSWSADSKQVLTVSADKTAKVW |
| 491 | 9 | f | GIGGVDDMLVGCLWQNDHLVTVSLGGT |
| 492 | 9 | g | SPDGTEAIVGAQDGKLRIYS |
| 493 | 9 | h | GDTLTEEAVLERHRGAI |
| 494 | 9 | i | YSPDVSMFASADANREAV |
| 495 | 9 | j | REIKLKNMLFHTARINCLAWSPD |
| 496 | 9 | k | DKPASSRITIKGAHLGGVH |
| 497 | 10 | a | PFDGQKPGTSGLRKKVTVFQQPHYLANFVQSTFNALP |
| 498 | 10 | b | TIVVSGDGRYFSKDAVQIITKMAAANGVRRVWVGQDSLLSTPAVSA |
| 499 | 10 | c | DGSKATGAFILTASHNPGGPTEDFGIKYNMGNGGPAPES |
| 500 | 10 | d | EYLIAEDLPDVDISALGV |
| 501 | 10 | e | FDVDVFDSATDYIKLMKTIFDFESIKKL |
| 502 | 10 | f | FCFDGLHGVAGAYAKRMFVDELGASESSLLNCVPKEDFGGGHPDPNLTYAKELVERMGLG |
| 503 | 10 | g | VEPPEFGAAADGDADRNMVLGKRFFVTPSDSVAIIAANAVQSIPYFASGLKGVARSMPTSA |
| | | | ALDVVAKNLNLKFFEVPTGWKFFGNLMDAGMCSVCGEESFGTGSDHIREKDGIWAVLAWL |
| | | | SIIAYKNK |
| 504 | 10 | h | KLVSVEDIVLQHWATYGRHYYTRYDYENVDAEAAKELMA |
| 505 | 10 | i | DVAEVVSADEFEYKDPVDGSVSKHQGIRYLFGDGSRLVFRLSGTGSVGATIRIYIEQYEKDS |
| | | | SKTGRES |
| 506 | 10 | j | DALSPLVDVALKLSK |
| 507 | 11 | a | TPVMDSLKNGAPEKWTLVKAHGTAVGLPSDDDMGNSEVGHNALGAGRIFAQGAKLVDAA |
| | | | LASGKIWE |
| 508 | 11 | b | GTLHLIGLLSDGGVHSRLDQVQLLVKGASERGAKRIRLHILTDGRDVLDGSSVGFVETLEN |
| | | | DLA |
| 509 | 11 | c | LREKGVDAQVASGGGRMYVTMDRYENDWDVVKRGWDAQVLGEAPYKFKS |
| 510 | 11 | d | DQYLPAFVIVDESGKSVGPIVDGDAVVTFNFRADRMVMLAKALE |
| 511 | 11 | e | DFDKFDRVRVPKIKYAGMLQYDGELKLPNK |
| 512 | 11 | f | LVSPPLIERTSGEYLVKNGVRTFACSETVKFGHVTFFWNGNRSGYFDE |
| 513 | 11 | g | KEEYIEIPSDSGITFNEQPKMKALEIAEKTRDAILSGKFDQVRINLPNGDMVGHTGDIEATVV |
| | | | ACKAADEAVKIVLDAVEQVGGIYLVTADHGNAEDMVKRNKSGQP |
| 514 | 11 | h | GSIQILTSHTLQPVPVAIGGPGLH |
| 515 | 11 | i | TPGLANVAATVMNLHGFQAPDDYE |
| 516 | 13 | a | MDEEYDVIVLGTGLKECILSGLLSVDGLKVLHMDRNDYYGGESTSLNLTK |
| 517 | 13 | b | SKEYNVDMVPKFMMANGALVRVLI |
| 518 | 13 | c | TSVTKYLNFKAVDGSFVYN |
| 519 | 13 | d | GKIHKVPATDVEALKSNLMGLFEKRRARKFFIYVQDYE |
| 520 | 13 | e | KYGLEDDTVDFIGHALALHRDDNYLD |
| 521 | 13 | f | KRMKLYAESLARFQGGSPYIYPLYGLGELPQAFARLSAVYGGTYMLNKPECKVEF |
| 522 | 13 | g | GKAFGVTSEGETAKCKKVVCDPSYLPDKVTKVGRVARAICIMKHPIPDT |
| 523 | 13 | h | KQLKRKSDMYVFCCSYAHNVAPKGKFIAFVSTEAETDKPEIELKPGIDLLGPVE |
| 524 | 13 | i | SYDATTHFETTVKDV |
| 525 | 13 | j | YSKITGKELDLSVDLNAASA |
| 526 | 19 | a | GVVATTDAVEACTGVNVAVMVGGFPRKEGMERKDVMSKNVSIYKSQASALEAHAAPNCKV |
| | | | LVVANPANTNALILKEFAPSIPEKNISCLTRLDHNRALGQVSERLNVQVSDVKNVLIWGNHS |
| | | | SSQYPDVNHATV |
| 527 | 19 | b | GPFIATVQQRGAAIIKARKLSSALSAASSACDHIRDWVLGTPEGTFVSMGVYSDGSYGVPA |
| | | | GLIYSFPVTCSGGEWTIVQGLPIDEFSRKKMD |
| 528 | 19 | c | TAQELSEEKALAYSCL |
| 529 | 20 | a | PSPAVFVDKSTRVICQGITGKNGTFHTEQAIEYGTNMVGGVTPKKGGTEHLGLPVFNSVAE |
| | | | AKAETKANASVIYVPPPFAAAAIMEALEAELDLVVCITEGIPQHDMVKVKAALNRQSKTRLIG |
| | | | PNCPGIIKPGECKIGIMPGYIHKPGRIGIVSRSGTLTYEAVFQTTAVGLGQSTCVGMGGDPF |
| | | | NGTNFVDCLEKFVADPQTEGIVLIGEIGGTAEEDAAAFIQ |
| 530 | 20 | b | KPVVAFIAGLTAPPGRRMGHAGAIVSGGKGTAQDKIKALREAGVTVVESPAKIGSTMF |
| 531 | 22 | a | MALPNQGTVDYPSFKLVIVGDGGTGKTTFVKRHLTGEFEKKYEPTIGVEVHPLDFTTNCGKI |
| | | | RFYCWDTAGQEKFGGLRDGYYIHGQCAIIMFDVTSRLTYKNVPTWHRDLCRVCENIPIVLC |
| | | | GNKVDVKNRQVKAKQVTFHRKKNLQYYEISAKSNYNFEKPFLYLARKLAGDANIHFVE |
| 532 | 24 | a | ITDDTRIRASIPTIK |
| 533 | 24 | b | GAKVILASHLGRPKGVTPKFSLKPLVPRLSELLGVEVVMA |
| 534 | 24 | c | AALPEGGVLLLENVRFYKEEEKNDPEFAKKLASVADLYVNDAFGTAHRAHASTEGVTKFLRP |
| | | | SVAGFLMQKELDYLVGAVANPKKPFAAIVGGSKVSSKIGVIESLLAKVDILILGGGMIFTFYK |
| | | | AQGKAVGKSLVEEDKLELAT |
| 535 | 24 | d | AKAKGVSLLLPTDVVVADKFA |
| 536 | 24 | e | AIPDGWMGLDVGPDSIKTFSEALDTTKTVIWNGPMGVFEFEKFAAGT |
| 537 | 24 | f | LADLTGKGVTTIIGGGDSVAAVEKAGLADKMSHISTGGGASLELLEGKPLPGVLALDEA |
| 538 | 26 | a | GVFTDKDKAAAHMKGGAKKVVISAPSKDAPMFVVGVNED |
| 539 | 26 | b | DVNIVSNASCTTNCLAPLAKIINDNFGIVEGLMTTVHSITATQKTVDGPSSKDWRGGRAAS |
| | | | FNIIPSSTGAAKAVGKVLPELNGKLTGMSFRVPTVDVSVVDLTVRIEKAASYE |
| 540 | 26 | c | VSTDFIGDSRSSIFDAKAGIALNDNFVKLVSWYDNEWGY |
| 541 | 26 | d | PIKIGINGFGRIGRLVARVALQC |
| 542 | 26 | e | ELVAVNDPFITTDYMTYMFKYDTVHGQWK |
| 543 | 26 | f | AAGADYVVESTGVFTDKDKAAAHIKGGAKKVIISAPSKDAPMFVCGVNEKEYT |
| 544 | 26 | g | ITIVSNASCTTNCLAPLAKVINDRFGIVEGLMTTVHAMTATQKTVDGPSSKDWRGGRAASF |
| | | | NIIPSSTGAAKAVGKVLPVLNGKLTGMAFRVPTVDVSVVDLTVRLEKAATYEQIKAAIKEESE |
| | | | GNLKGILGYV |
| 545 | 26 | h | VSTDFQGDSRSSIFDAKAGIALNDNFVKLVSWYDNEWGYSTRVVDLI |
| 546 | 27 | a | GKYKDELIKNAAYIGTPGKGILAADESTGTIGKRFASINVENVEDNRRALRELLFTTPGALQH |
| | | | ISGVILFEETLYQ |
| 547 | 27 | b | LKENNVLPGIKVDKGTVELAGTD |
| 548 | 27 | c | KRCAKYYEAGARFAKWRAVLKIGPNEPSQLSI |
| 549 | 27 | d | QNAQGLARYAIICQENGLVPIVEPEILVDGPHDIE |
| 550 | 27 | e | CAYVTEVVLAACYKALNDQHVLLEGSLLKPNMVTPGSDAKKVAPEVI |
| 551 | 27 | f | PPAVPAIVFLSGGQSEEEATVNLNAMNK |
| 552 | 27 | g | LSFSFGRALQQSTLKAWSGKEENV |
| 553 | 27 | h | GEGASESLHVKDYKY |
| 554 | 29 | a | FKYVILGGGVAAGYAAREFAKQGVQPGELAIISKESVAPYERPALSKGYLFPQ |
| 555 | 29 | b | AARLPGFHTCVGSGGEKLLPEWYTEKGIELILSTEIVKADLASKTLTSAAG |
| 556 | 29 | c | QAKKDGKAVVVGGGYIGLELSAALK |
| 557 | 29 | d | NNFDVTMVYPEPWCMPRLFTAGIAHFYEGYY |
| 558 | 29 | e | VGVGGRPLTGLFKGQV |
| 559 | 29 | f | PRRVEHVDHARKSAEQAVKAIKAKE |
| 560 | 29 | g | AEYDYLPYFYSRSFDIAWQFYGDNVG |
| 561 | 29 | h | YWVKDGKVVGVFLEGG |
| 562 | 30 | a | SGHSLLRDPRHNKGLAFSE |
| 563 | 30 | b | YIAMMDLQERNERLFYKLLIDNVEELLPVVYTPVVGEACQKYGSI |
| 564 | 30 | c | NWPERSIQVIVVTDGERILGLGDLGCQGMGIPVGKLSLYTALGGVRPSACLPITIDVGTNNQ |
| | | | TLL |
| 565 | 30 | d | NYGEKVLVQFEDFANHNAFDLLA |
| 566 | 30 | e | KSHLVFNDDIQGTASVVLAGLLAAL |
| 567 | 30 | f | DQTYLFLGAGEAGTGIAELIALEMSK |
| 568 | 30 | g | ESLQHFKKPFAHEHEP |
| 569 | 30 | h | VLIGTSGVGKTFTQEV |
| 570 | 30 | i | LSNPTSHSECTAEEAYTW |
| 571 | 30 | j | AVFASGSPFDPVEYE |
| 572 | 30 | k | VPGQSNNAYVFPGFGLG |
| 573 | 30 | I | GAIRVHDDMLLAASEALA |
| 574 | 30 | m | LPRPDDLVKYAESCMY |
| 575 | 34 | a | AAVAWEAGKPLSIEEVEVAPPQAMEVRVKILFTALCHTDVYFWEAKGQTPVFPRIFGHEAGG |
| | | | IVESVGEGVTDVAPGDHVLPVFTGECKECRHCKSAESNMCDLLRINTDRGVMISDGKSRFS |
| 576 | 34 | b | GKPIFHFVGTSTFSEYTVMHVGCVAKINPEAPLDKVCVLSCGISTGLGASINVAKP |
| 577 | 34 | c | GSTVAIFGLGAVGLAAAEGARIAGASRIIGIDLNA |
| 578 | 34 | d | TEFVNPKDHTKPVQEV |
| 579 | 34 | e | AEMTDGGVDRSVECTGNINAMIQAFECVHDGWGVAVLVGVPHKDA |
| 580 | 34 | f | FKTHPMNFLNERTLKGTFFGNFKPRTD |
| 581 | 34 | g | EKFITHSVTFSEINKAFD |
| 582 | 34 | h | CLAKINPEAPLDKVCVLSCGISTGLGAMLNVAKPKKGSTVAIFGLGAVGLAAMEGARMAGA |
| | | | SRIIGVDLNP |
| 583 | 34 | i | EMTNGGVDRAVECTGHIDAMIAAFECVHDGWGVAVLVGVPHKE |
| 584 | 34 | j | VFKTHPMNFLNERTLKGTFFGNYKPRTDLP |
| 585 | 39/59 | a | PSEDAVEVVVSPPFVFLQ |
| 586 | 39/59 | b | AVAAQNCWVRKGGAFTGEISAEMLVNLQVPWVILGHSERRALLSESNDFV |
| 587 | 39/59 | c | DKVAYALAQGLKVIACIGETLEQREAGTTMEVVAAQTKAIAEKISDWTNVVLAYEPVWAIGT |
| | | | GKVASRAQAQEVH |
| 588 | 39/59 | d | TRIIYGGSVNGANCKELAAQPDLDGFLVGGASLKPEFVDIIK |
| 589 | 39/59 | e | AEMLANLGIPWVILGHSERRALLGESSEFVGDKVAYALAQGLKVIACVGETLEQREAGSTM |
| 590 | 39/59 | f | WTNVVIAYEPVWAIGTGKVATPAQAQEVHANLR |
| 591 | 39/59 | g | SPEVAETTRIIYGGSVTG |
| 592 | 39/59 | h | NELAAQPDVDGFLVGGASLKPEFIDIINAA |
| 593 | 43 | a | VTGYFAWSLLDNFEW |
| 594 | 47 | a | VQWSKWHVFWVDERVVPKDHVDSNYKLA |
| 595 | 47 | b | ATGFPRFDLMLLGMGPDGHLASLFPGHPLLNE |
| 596 | 47 | c | DSPKPPPQRITFTFPVIKSSAYVA |
| 597 | 47 | d | DGHLASLFPGHPLLNE |
| 598 | 47 | e | DSPKPPPQRITFTFPVIKSSAYVA |
| 599 | 49 | a | YNLLDTVSRHTIQVYPRSWTAVMLTFDNAGMWNLRSNLWERYY |
| 600 | 49 | b | SCTSPARSLRDEYNMPENGLRCGKIVGLPLPPSY |
| 601 | 49 | c | MGPGKWKPELRKTYNLLDAVSRHSIQVYPRSWSAVMLTFDNAGMWNVRSNVWERHYLGE |
| | | | QLYISVISPARSLRDEYNFPENALRCGKVVGLPLPPSYLPA |
| 602 | 51 | a | SVYMAKLAEQAERYEEMVEFM |
| 603 | 51 | b | ELSVEERNLLSVAYKNVIGARRASWRIISSIEQKEEG |
| 604 | 51 | c | AGAAESKVFYLKMKGDYHRYLAEFKSGAERKEAAESTM |
| 605 | 51 | d | AQDIALADLAPTHPIRLGLALNFSVFYYEILNSPDRACNLAKQAFDEAISELDSLGEESYKDS |
| | | | TLIMQLLRDNLTLWTSDTN |
| 606 | 54 | a | AEDPYVFFEWHVTYGT |
| 607 | 54 | b | FPGPRINCSSNNNIVVNVFNQLDQP |
| 608 | 54 | c | LFTWNGIQHRKNSWQDG |
| 609 | 54 | d | CNVGIKSSLNFRIQGHDMRLVE |
| 610 | 54 | e | GWAWSLNQWRSFRWNLTASAARPNPQGSYHYGQINITRTIKLMI |
| 611 | 54 | f | NGVSHVDADTPLKLAEYF |
| 612 | 54 | g | PELRKTYNLLDAVSRHSIQVYPRSWSA |
| 613 | 54 | h | QLYISVISPARSLRDEYNFPEN |
| 614 | 56 | a | QVAIGTDDVYKSAEA |
| 615 | 56 | b | ELGGKILRQPGPLPGLNTKIASFLDPDGWKVVLVDH |
| 616 | 56 | c | DRRRLLHVVYRVGDLDKTIKFYTECLGMKLLRKRDIPEERY |
| 617 | 56 | d | GPEDSHFVVELTYNYGVESYDIG |
| 618 | 56 | e | IKAKGGTVTREPGPVKGGKSVIAF |
| 619 | 56 | f | FELIERGPTPEPLCQVMLRVGDLDRAIKFYEKAFGMELLRRKDNPQYKYTIAMMGYGPEDKN |
| | | | AVLELTYNYGVKEYDKGNAYAQIAIGTDDVYKTAEVV |
| 620 | 56 | g | NGGQITREPGPLPGISTKITACTDPDGWKSVFVDNLDFLKELE |
| 621 | 62 | a | NPTTAAGVLRVFFHDCFVSGCDASVLI |
| 622 | 62 | b | SEKDADINHSLPGDAFDAVVRSK |
| 623 | 62 | c | ALELECPGVVSCADILA |
| 624 | 62 | d | KGFTVQEMVALSGAHTLGFSHCQEF |
| 625 | 62 | e | AAFNDIMTPGKFDNMYYVN |
| 626 | 73 | a | SQDEAGTSAIKTVELDTMLGGRAVQHREPQGYESDKFLSYFKPCIIPLEGG |
| 627 | 73 | b | VPFARSSLNHDDVFILDTEKKIYQFNGANSNIQERAKALEVIQHLKDKYHEGVCDVAIVDD |
| | | | GKLQAESDSGEFWVVFGGFAPIGKKT |
| 628 | 73 | c | DCGSELFVWVGRVTQVD |
| 629 | 73 | d | GDCYIVLYTYHSGEK |
| 630 | 73 | e | KGRPVLGRIYQGKEPPQFIALFQPMVILKGG |
| 631 | 73 | f | YEQQQWAAKVAEFLKPG |
| 632 | 73 | g | EDVMILDTHAEVFVW |
| 633 | 76 | a | SGLNVLIETYFADVPAESYKTLTSL |
| 634 | 76 | b | IPSGKYLFAGVVDGRNIWADDLAASLS |
| 635 | 76 | c | CSLMHTAVDLVNETKLDSEIKSWLAFAAQKVVEVNALGKALVG |
| 636 | 76 | d | ANAAAQASRRSSPRVNNEEVQKAAAALKGSDHRRATTVSARLDAQQKKLNLPVLPTTTIGS |
| | | | FPQT |
| 637 | 76 | e | KISEEAYVSAIKEEI |
| 638 | 76 | f | KVVKIQEELDIDVLVHGEPERNDMVEYFGEQLSGFAFTANGWVQSYGSRCVKPPIIYGDVS |
| | | | RPNPMTVFWS |
| 639 | 76 | a | KISEEAYVSAIKEEI |
| 640 | 76 | b | KVVKIQEELDIDVLVHGEPERNDMVEYFGEQLSGFAFTANGWVQSYGSRCVKPPIIYGDVS |
| | | | RPNPMTVFWS |
| 641 | 77 | a | QEVAGDVRMTDTRADEAERGITIKSTGISLYYEMSEE |
| 642 | 77 | b | RDGNDYLINLIDSPGHVDFSSEVTAALRITDGALVVVDCIEGVCVQTETVLRQALGERIRPV |
| | | | LTVNKMDRCFLELQVDGEEAYQTFSRVIENANVIMATYEDALLGDVQVYPEKGTVAFSAGL |
| | | | HGWAFTLTNFAKMYASKFGVDESKMMERLWGENFFDPATKKWT |
| 643 | 77 | c | KNTGSGTCKRGFVQFCYEPIKQIIEICMND |
| 644 | 77 | d | KDKLWPMLKKLGVTMK |
| 645 | 77 | e | DEKDLMGKALMKRVMQAWLPAS |
| 646 | 77 | f | HLPSPSKAQRYRVENLYEGPLDDVYANAIRNCDPEGPLMLYVSKMIPASDKGRFFAFGRVFA |
| | | | GRV |
| 647 | 77 | g | TGMKVRIMGPNFVPGQKKDLYTKSVQRTVIWMGKKQESVEDVPCGNTVALVGLDQFITKN |
| | | | ATLTGEKEVDACPIRAMKFSVSPVVRVAVQCKVASDLPKLVEGLKRLAKSDPMVLCSIEESG |
| | | | EHIIAGAGELHLEICLKDLQDDFMGGAEIIVSPPVVSFRETVLDKSCRTVMSKSPNKHNRLY |
| | | | MEARPLEEGLPEAIDEGRIGPRDDPKVRSKILSEEFGWDKDLAKKIWCFGPETTGPNMVVD |
| | | | MCKGVQYLNEIKDSVVAGFQWASKEGALADENMRGICFEVCDVVLHTDAIHRGGGQVIPT |
| | | | ARRVIFASQLTAKPRLLEPVYLVEIQAPEGALGGIYGVLNQKRGHVFEEMQRPGTPLYNIKAY |
| | | | LPVIESFGFSATLRAATSGQAFPQCVFDHWDVM |
| 648 | 77 | h | LVKEIRKRKGLKEQMTPLSDFEDKL |
| 649 | 86/51 | a | REESVYMAKLAEQAERYEEMVEFMERV |
| 650 | 86/51 | b | EELSVEERNLLSVAYKNVIGARRASWRIISSIEQKEEGRGND |
| 651 | 86/51 | c | AESKVFYLKMKGDYHRYLAEFKSGAERKEAAESTM |
| 652 | 86/51 | d | YKAAQDIALADLAPTHPIRLGLALNFSVFYYEILNSPDRACNLAKQAFDEAISELDSLGEESY |
| | | | KDSTLIMQLLRDNLTLWTSDTN |
| 653 | 86/51 | e | REENVYMAKLAEQAERYEEMVEFMEKVA |
| 654 | 86/51 | f | GELTVEERNLLSVAYKNVIGARRASWRIISSIEQKEESRGNEAYV |
| 655 | 86/51 | g | IETELSKICDGILKLLDSHL |
| 656 | 86/51 | h | AESKVFYLKMKGDYHRYLAEF |
| 657 | 86/51 | i | DYHRYLAEFKAGAERKEAAENTLVAYKSAQDIA |
| 658 | 86/51 | j | LPTTHPIRLGLALNFSVFYYEILNSPDRACNLAKQAFDEAIAELDSLGEESYKDSTLIMQLLRD |
| | | | NLTLWTSDNAD |
| 659 | 87 | a | VYYSMYGHVGKLAEEIKKGASSVEGVEVK |
| 660 | 87 | b | ELAEADGILFGFPTRFGMMASQMKAF |
| 661 | 87 | c | DATGGLWREQSLAGKPAG |
| 662 | 87 | d | FFSTGTQGGGQETTPLTAVTQLTHHGMVFVPVGYTFGA |
| 663 | 87 | e | MFDMEKVQGGSPYGAGTFAGDGSRWPSE |
| 664 | 91 | a | VFFDVTIGGAPAGRIVMELYADVVPKTAENFRALCTGEKGVGKMGKPLHYKGSSFHRVIPGF |
| | | | MCQGGDFTAGNGTGGESIYGAKFADENFVKKHTGPGVLSMANAGPGTNGSQFFLCTAKTA |
| | | | WLDGKHVVFGQVVEGMDVVKAVEKVGSQSGRCSKPVVIADCGQL |

[0243] Table 4 shows wild type sequences of proteins found in non-Timothy grass pollen, which sequences contains PG+ peptides of a peptide thereof with less than 3 mismatches compared to the PG+ peptide and/or contain a GWT sequence of Table 3.

TABLE 4
Table 4 (SEQ ID Nos: 665-1109

| SEQ | | | |
|---|---|---|---|
| ID | NTGA | | |
| NO | No | Species | Sequence |
| 665 | 1 | Amb_a | LMATIKAVKARQIFDSRGNPTVEVDITLSDGTLARAAVPSGASTGIYEALELRDGG |
| | | | SDYLGKGVSKAVANVNTIIGPALVGKDPTDQTGIDNFMVQQLDGTQNEWGWCK |
| | | | QKLGANAILAVSLAVCKAGASVLKTPLYKHIANLAGNKNLVLPVPAFNVINGGSHA |
| | | | GNKLAMQEFMILPIGASSFKEAMKMGVEVYHNLKSVIKKKYGQDATNVGDEGGF |
| | | | APNIQENKEGLELLKTAIAKAGYTDKVVIGMDVAASEFYGEKDKTYDLNFKEENND |
| | | | GKEKISGEQLKDLYKSFVSEYPIVSIEDPFDQDDWEHY |
| 666 | 1 | Amb_p | ARQIFDSRGNPTVEVDITLSDGTLARAAVPSGASTGIYEALELRDGGSDYLGKGVS |
| | | | KAVANVNTIIGPALVGKDPTDQTGIDNFMVQQLDGTQNEWGWCKQKLGANAILA |
| | | | VSLAVCKAGASVLKTPLYKHIANLAGNKNLVLPVPAFNVINGGSHAGNKLAMQEF |
| | | | MILPIGASSFKEAMKMGVEVYHNLKSVIKKKYGQDATNVGDEGGFAPNIQENKEG |
| | | | LELLKTAIAKAGYTDKVVIGMDVAASEFYGEKDKTYDLNFKEENNDGKEKISGEQL |
| | | | KDLYKSFVSEYPIVSIEDPFDQDDWEHYAKMTAECGEQVQIVGDDLLVTNPTRVK |
| | | | KAIDEKTCNALLLKVNQIGSVTESIEAVRMSKHAGWGVMASHRSGETEDTFIADL |
| | | | SVGLATGQIKTGAPCRSERLAKYNQLLRIEEELGSEAVYAGANFRKPVEPY |
| 667 | 1 | Bet_v | AEITHVKARQIFDSRGNPTVEAEVTTANGVVSRAAVPSGASTGVYEALELRDGGS |
| | | | DYLGKGVLKAVENVNAIIGPALIGKDATEQAAIDNFIVQQLDGTVNEWGWCKQKL |
| | | | GANAILAVSLAVCKAGASAKKIPLYKHIANLAGNPKLVLPVPAFNVINGGSHAGNK |
| | | | LAMQEFMILPVGASSFKEAMKMGVEVYHHLKAVIKKKYGQDATNVGDEGGFAPNI |
| | | | QENKEGLELLKTAIAKAGYTGKVVIGMDVAASEFYGEDKRYDLNFKEENNDGSQK |
| | | | IPGDALKDLYKSFVAEYPIVSIEDPFDQDDWEHYSKVTAEIGEKVQIVGDDLLVTN |
| | | | PKRVEKAIKEKSCNALLLKVNQIGSVTESIEAVKMSKRAGWGVMASHRSGETEDT |
| | | | FIADLSVGLATGQIKTGAPCRSERLAKYNQLLRIEEELGSEAVYAGANFRTPVEPY |
| 668 | 1 | Cyn_d | MAATIQSVKARQIFDSRGNPTVEVDVCCSDGTFARAAVPSGASTGVYEALELRDG |
| | | | GSDYLGKGVSKAVNNVNSIIGPALIGKDPTAQTEIDNFMVQQLDGTKNEWGWCK |
| | | | QKLGANAILAVSLAVCKAGASIKKIPLYQHIANLAGNKQLVLPVPAFNVINGGSHA |
| | | | GNKLAMQEFMILPTGASSFKEAMKMGVEVYHNLKSVIKKKYGQDATNVGDEGGF |
| | | | APNIQENKEGLELLKTAIEKAGYTGKVVIGMDVAASEFYNDKDKTYDLNFKEENND |
| | | | GSQKISGDSLKNVYKSFVSEYPIVSIEDPFDQDDWVHYAKMTEEIGEQVQIVGDD |
| | | | LLVTNPTRVSKAIKEKSCNALLLKVNQIGSVTESIEAVKMSKHAGWGVMTSHRSG |
| | | | ETEDTFIADLAVGLATGQIKTGAPCRSERLAKYNQLLRIEEELGAAAVYAGAKFRAP |
| | | | VEPY |
| 669 | 1 | Que_a | MAITIQAIKARQIFDSRGNPTVEVDVTTSDGAFYRAAVPSGASTGIYEALELRDGG |
| | | | SDYLGKGVSKAVENVNAIIAPALIGKDPTDQVAIDNFMVQQLDGTVNEWGWCKQ |
| | | | KLGANAILAVSLAVCKAGAGVNKIPLYKHIANLAGNKKLVLPVPAFNVINGGSHAG |
| | | | NKLAMQEFMILPVGASSFKEAMKMGVEVYHNLKSVIKKKYGQDATNVGDEGGFA |
| | | | PNIQENKEGLELLKTAIAKAGYTSQVVIGMDVAASEFYGEDKRYDLNFKEEKNDGS |
| | | | QKIPGDALKDLYKSFVSEYPIVSIEDPFDQDDWEHYGKMTSEVGEKVQIVGDDLL |
| | | | VTNPKRVEKAIKEKTCNALLLKVNQIGSVTESIEAVKMSKRAGWGVMASHRSGET |
| | | | EDTFIADLSVGLATGQIKTGAPCRSERLAKYNQLLRIEEELGSEAVYAGASFRRPVE |
| | | | PY |
| 670 | 2 | Amb_a | AALISDTAPWKDLKAHVGEIDKTHLRDLMSDTERCSSMMLEFDGIFLDYSRQRAT |
| | | | VDTVSKLFTLAEEAHLKQKINSMFNGEHINSTENRSVLHVALRAAKDTTINSDGKN |
| | | | VVPDVWQVLDKIKEFSDKVRNGSWVGATGKALTNVIAIGIGGSFLGPLFVHTALQ |
| | | | TDPEASKLAGGRQLRFLANVDPVDVARNISGLDPETTLVVVVSKTFTTAETMLNAR |
| | | | TLREWISSALGPQAVSKHMVAVSTNLKLVEKFGIDPNNAFAFWDWVGGRYSVCS |
| | | | AVGVLPLSLQYGFSVVEKFLKGARSIDQHFHSAPFESNIPVLLGLLSVWNVSFLGYP |
| | | | ARAILPYTQALEKLAPHIQQVSMESNGKGVSIDGVRLPFEAGEIDFGEPGTNGQHS |
| | | | FYQLIHQGRVIPCDFIGIVKSQQPVYLKGSVLLVTDSGWKNQLLILDGRISLQLQGL |
| | | | VIPQPL |
| 671 | 2 | Amb_p | GRQLRFLANVDPVDVARNISGLDPETTLVVVVSKTFTTAETMLNARTLREWISSAL |
| | | | GPQAVSKHMVAVSTNLKLVEKFGIDPNNAFAFWDWVGGRYSVCSAVGVLPLSLQ |
| | | | YGFSVIEKFLEGARSIDQHFHSAPFENNIPVLLGLLSVWNVSFLGYPARAILPYTQA |
| | | | LEKLAPHIQQVSMESNGKGVSIDGVRLPFEAGEIDFGEPGTNGQHSFYQLIHQGR |
| | | | VIPCDFIGIVKSQQPVYLKDEVVNNHDELMSNFFAQPDALAYGKTPEQLQSENVAS |
| | | | HLVPHKTFTGNRPSLSLLLPSLDAYRIGQLLAIYEHRIAVEGFIWGINSFDQWGVEL |
| | | | GKSLASQVRKQLHASRKKGESVEGFNFSTTKLLTRYLEASADVPSEPTTLLPKI |
| 672 | 2 | Ant_o | TKSGDGDQTISGPQKRSSRAVRAPSSFLPVCLLRPLPPRDGRPPSSGSLPPKLPRG |
| | | | AGPGTKSSAPMASPALISDTDQWKALQAHVGAIHKTHLRDLMADADRCKALTAEF |
| | | | EGVFLDYSRQQATTETVDKLFKLAEAAKLKEKIAKMFNGDKINSTENRSVLHVALR |
| | | | APRDAVINSDGVNVVPEVWAVIDKIKQFSETFRSGSWVGATGKPLTNVVSVGIGG |
| | | | SFLGPLFVHTALQTDPVAAESAKGRQLRFLANVDPVDVARSIKDLDPETTLVVVVS |
| | | | KTFTTAETMLNARTIKEWIVSSLGPQAVSKHMIAVSTNLKLVKEFGIDPNNAFAFW |
| | | | DWVGGRYSVCSAVGVLPLSLQYGFPVVQKFLEGASSIDNHFRTSSFEKNIPVLLGL |
| | | | LSVWNVSFLGYPARAILPYSQALEKLAPHIQQLSMESNGKGVSIDGVRLPYEAGEI |
| | | | DFGEPGTNGQHSFYQLIHQGRVIPCDFIGVIKSQQPVYLKGETVSNHDELMSNFFA |
| | | | QPDALAYGKTPEQLRSENVSENLIPHKTFQGNRPSLSFLLSSLSAYEIGQLLAIYEH |
| | | | RIAVQGFIWGINSFDQWGVELGKSLASQVRKQLHASRMEGKPIEGFNPSSASLLA |
| | | | RYLSVEPSTPFDTTVLPKV |
| 673 | 2 | Bet_v | MASRTLISDTEAWKNLKAHVEEIKKTHLRDLMSDAERCKSMMVESEGVLLDHSR |
| | | | QRATPETMDKLFKLAEAAHLKEKINRMYSGVHINSTENRPVLHVALRASRDGVIQS |
| | | | DGKNVVPEVWKVLDKIQEFSERVRNGSWVGATGKALKDVVAVGIGGSFLGPLFV |
| | | | HTALQTDPEAIESARGRQLRFLANVDPIDVARNITGLNPETTLVVVVSKTFTTAETM |
| | | | LNARTLREWISAALGPSAVAKHMVAVSTNLTLVEKFGIDPNNAFAFWDWVGGRYS |
| | | | VCSAVGVLPLSLQYGFSVVEKFLKGASSIDQHFYSAPYEKNIPVLLGLLSIWNVSFL |
| | | | GYPARAILPYSQALEKFAPHIQQVSMESNGKGVSIDGVLLPFEAGEIDFGEPGTNG |
| | | | QHSFYQLIHQGRVIPCDFIGIVRSQQPVYLKGEVVSNHDELMSNFFAQPDALAYGK |
| | | | TPEQLHKENVSPHLIPHKTFSGNRPSLSLLLPSLNAYNIGQLLAIYEHRIAVEGFVW |
| | | | GINSFDQWGVELGKSLATQVRKQLNASRTKGEPVEGFNFSTTTLLTRYLEATADIP |
| | | | SDPPTLLPRI |
| 674 | 2 | Bet_v | SFQMASRTLISDTEAWKNLKAHVEEIKKTHLRDLMSDAERCKSMMVESEGVLLDH |
| | | | SRQRATPETMDKLFKLAEAAHLKEKINRMYSGVHINSTENRPVLHVALRASRDGVI |
| | | | QSDGKNVVPEVWKVLDKIQEFSERVRNGSWVGATGKALKDVVAVGIGGSFLGPL |
| | | | FVHTALQTDPEAIESARGRQLRFLANVDPIDVARNITGLNPETTLVVVVSKTFTTAE |
| | | | TMLNARTLREWISAALGPSAVAKHMVAVSTNLTLVEKFGIDPNNAFAFWDWVGG |
| | | | RYSVCSAVGVLPLSLQYGFSVVEKFLKGASSIDQHFYSAPYEKNIPVLLGLLSIWNV |
| | | | SFLGYPARAILPYSQALEKFAPHIQQVSMESNGKGVSIDGVLLPFEAGEIDFGEPGT |
| | | | NGQHSFYQLIHQGRVIPCDFIGIVRSQQPVYLKGEVVSNHDELMSNFFAQPDALA |
| | | | YGKTPEQLHKENVSPHLIPHKTFSGNRPSLSLLLPSLNAYNIGQLLAIYEHRIAVEGF |
| | | | VWGINSFDQWGVELGKSLATQVRKQLNASRTKGEPVEGFNFSTTTLLTRYLEATA |
| | | | DIPSDPPTLLPRI |
| 675 | 2 | Cyn_d | AGVRTHFYRAAVRSAYAGRGCPHRPHQPNIQFKGRGVYVYHHHHYRRLPTGTRRK |
| | | | EAIQNPRKLAGGEEQIRFLFQRSTLHPRRPADEAMASPALICDTEQWKALQAHVSA |
| | | | IQKTHLRDLMADADRCKAMTAEFEGIFLDYSRQQATGETMEKLLKLAEAAKLKEKI |
| | | | EKMFKGDKINSTENRSVLHVALRAPRDAVINSDGVNVVPEVWGVKDKIKQFSETF |
| | | | RSGSWVGATGKALTNVVSVGIGGSFLGPLFVHTALQTDPEAAECAKGRQLRFLAN |
| | | | VDPVDVARSIKDLDPETTLVVVVSKTFTTAETMLNARTLKEWIVSSLGPQAVSKHM |
| | | | IAVSTNLKLVKEFGIDPNNAFAFWDWVGGRYSVCSAVGVLPLSLQYGFPIVQKFLE |
| | | | GASSIDNHFYSCSFEKNIPVLLGLLSVWNVSFLGYPARAILPYAQALEKFAPHIQQL |
| | | | SMESNGKGVSIDGVKLSFETGEIDFGEPGTNGQHSFYQLIHQGRVIPCDFIGVVQ |
| | | | SQRPVYLKGETVSNHDELMSNFFAQPDALAYGKTPEQLHSEKVPENLIPHKTFQG |
| | | | NRPSLSLLLPTLSAYEIGQLLAIYEHRIAVQGFVWGINSFDQWGVELGKSLASQVR |
| | | | KQLHGSRMEGKPVEGFNPSTSSLLARYLAVKPSTPYDSTVLPKV |
| 676 | 2 | Cyn_d | MASPALICDTEQWKALQAHVSAIQKTHLRDLMADADRCKAMTAEFEGIFLDYSRQ |
| | | | QATGETMEKLLKLAEAAKLKEKIEKMFKGDKINSTENRSVLHVALRAPRDAVINSD |
| | | | GVNVVPEVWGVKDKIKQFSETFRSGSWVGATGKALTNVVSVGIGGSFLGPLFVH |
| | | | TALQTDPEAAECAKGRQLRFLANVDPVDVARSIKDLDPETTLVVVVSKTFTTAETM |
| | | | LNARTLKEWIVSSLGPQAVSKHMIAVSTNLKLVKEFGIDPNNAFAFWDWVGGRYS |
| | | | VCSAVGVLPLSLQYGFPIVQKFLEGASSIDNHFYSCSFEKNIPVLLGLLSVWNVSFL |
| | | | GYPARAILPYAQALEKFAPHIQQLSMESNGKGVSIDGVKLSFETGEIDFGEPGTNG |
| | | | QHSFYQLIHQGRVIPCDFIGVVQSQRPVYLKGETVSNHDELMSNFFAQPDALAYG |
| | | | KTPEQLHSEKVPENLIPHKTFQGNRPSLSLLLPTLSAYEIGQLLAIYEHRIAVQGFV |
| | | | WGINSFDQWGVELGKSLASQVRKQLHGSRMEGKPVEGFNPSTSSLLARYLAVKP |
| | | | STPYDSTVLPKV |
| 677 | 2 | Fra_e | MASSSLICETDPWKDLRAHVEDIKKTHLRDLMSDTERCKSMMVEFDGILLDYSRQ |
| | | | RTNLDTLNKLHSLAEAAHLKEKIYRMFNGERINITENRSVLHIALRAPRDSVINGDG |
| | | | KNVVPDVWQVLDKIRDFSESVRSGAWVGATGKVLKDVIAVGIGGSFLGPLFVHTA |
| | | | LQSDPEASEFAHGRQLRFLANVDPIDVARNIAGLNPETTLVVVVSKTFTTAETMLN |
| | | | ARTLREWISAALGPQAVAKHMVAVSTNLTLVEKFGIDPNNAFAFWDWVGGRYSV |
| | | | CSAVGVLPLSLQYGFSVVEKFLKGASSIDQHFYSAPLEKNLPVLLGLLSVWNVSFL |
| | | | GYPARAILPYSQALEKFAPHIQQVSMESNGKGVSIDGVPLPYETGEIDFGEPGTNG |
| | | | QHSFYQLIHQGRVIPCDFIGVVKSQQPVYLKGEMVSNHDELMSNFFAQPDALAYG |
| | | | KTAEQLLKENVPQPLIPHKTFSGNRPSLSLLLPTLNAYNIGQLLAIYEHRIAVEGFLW |
| | | | GINSFDQWGVELGKSLATQVRKQLHASRKKGEPFEGFNFSTTTMLKRYLEESADV |
| | | | PKEDCTILPKI |
| 678 | 2 | Lol_p | LLRRSSPFHRHRSPAARRRHPPLARPTSPRRSAMASPALISDTDQWKALQAHVGA |
| | | | IHKTHLRDLMADADRCKAMTAEFEGIHLDYSRQQATTETVDKLFKLAEAAKLKEKI |
| | | | EKMFSGDKINTTENRSVLHVALRAPRDAVINSDGVNVVPEVWAVIDKIKQFSETF |
| | | | RSGSWVGATGKPLTNVVSVGIGGSFLGPLFVHTALQTDPAAAESAKGRQLRFLAN |
| | | | VDPVDVARSIKDLDPATTLVVVVSKTFTTAETMLNARTIKEWIVSSLGPQAVSKHM |
| | | | IAVSTNLKLVKEFGIDPNNAFAFWDWVGGRYSVCSAVGVLPLSLQYGFPIVQKFLE |
| | | | GASSIDNHFRTSSFEKNIPVLLGLLSVWNVSFLGYPARAILPYTQALEKLAPHIQQL |
| | | | SMESNGKGVSIDGVRLPYEAGEIDFGEPGTNGQHSFYQLIHQGRVIPCDFIGVIKS |
| | | | QQPVYLKGETVSNHDELMSNFFAQPDALAYGKTPEQLRSENVSENLIPHKTFQGN |
| | | | RPSLSFLLSSLSAYEIGQLLSIYEHRIAVQGFIWGINSFDQWGVELGKSLASQVRK |
| | | | QLHASRMEGKPVEGFNPSSASLLARYLAVEPSIPYDTTVLPKV |
| 679 | 2 | Ole_e | MASSSLIYETGAWKDLKAHVEDIEKIHLRDLMSDTVRCKSMIIDFDGVLLDYSRQR |
| | | | ANFDTLNKLHNLAKAAHLKEKINGMFNGERINSTENRSVLHIALRAPRDSVINSDG |
| | | | KNVVPDVWQVLDKIRDFSERVRSGAWVGATGKVLKDVIAIGIGGSFLGPLFVHTA |
| | | | LQKDPEAIEFARGRQLRFLANVDPIDVARNIAGLNPETTLVVVVSKTFTTAETMLNA |
| | | | RTLREWISAALGPQAVAKHMVAVSTNLTLVEKFGIDPNNAFAFWDWVGGRYSVC |
| | | | SAVGVLPLSLQYGFSVVEKFLKGASSIDQHFYSAPFEKNLPVLLGLLSIWNVSFLGY |
| | | | PARAILPYSQALEKFAPHIQQVSMESNGKGVSIDGVPLPYETGEIDFGEPGTNGQH |
| | | | SFYQLIHQGRVIPCDFIGVVKSQQPVYLKGEMVSNHDELMSNFFAQPDALAYGKT |
| | | | AEQLLKENVPQPLIPHKTFSGNRPSLSLLLPTLNAYNIGQLLAIYEHRIAVEGFLWGI |
| | | | NSFDQWGVELGKSLATQVRKQLHASRKKGEPIEGFNFSTTTMLTRYLEESADVPK |
| | | | EDCTILPKI |
| 680 | 2 | Pla_l | KTITSKQTANQPSSQSFFNTFRNMASSPLICETEPWKDLKVHVDDIKKTHLRELMT |
| | | | DTGRCQSMMVEFDELLLDYSRQCATLDTMKKLYALAEAAHLKEKISRMFNGERIN |
| | | | STENRSVLHVALRAPRDSVINSDGKNVVPDVWNVLDKIKDFSERVRSGAWVGAT |
| | | | GKALTEVVAIGIGGSFLGPLFVHTALQTDPEAAQFATGRQLRFLANVDPIDVARNIA |
| | | | GLNPETTLVVVVSKTFTTAETMLNARTLREWISAALGPEAVSKHMVAVSTNLTLVE |
| | | | KFGIDPKNAFAFWDWVGGRYSVCSAVGVLPLALQYGFEVVEKFLKGASSVDQHF |
| | | | SSAPFEKNLPVLLGLLSVWNVSFLGYPARAILPYSQALEKLAPHIQQVSMESNGKG |
| | | | VSIDGVPLPYEAGEIDFGEPGTNGQHSFYQLIHQGRVIPCDFIGVVKSQQPVYLKG |
| | | | EVVSNHDELMSNFFAQPDALAYGKTPEQLLKESVPNHLVTHKTFSGNRPSLSLLLP |
| | | | SLHAYNVGQLLAIYEHRVAVEGFVWGINSFDQWGVELGKSLASQVRKQLHASRK |
| | | | KGEPVEGFNFSTTTVLSRYLKESEADVPKEECTILPKM |
| 681 | 2 | Poa_p | QIRHGHSPVRSSPIHIPPPPPVSFSASSLLLSPSAPINPLPPPPIRRQPAPRHPRRHIL |
| | | | AGPLRGSMASPALISDTDQWKALQAHVGAIHKTHLRDLMADADRCKAMTVEFEG |
| | | | VFLDYARQQATTETVDKLFKLAEAAKLKEKIEKMFSGEKINSTENRSVLHVALRAPR |
| | | | DAVINSDGVNVVPEVWSVKDKIKQFSETFRSGSWVGATGKPLTNVVSVGIGGSF |
| | | | LGPLFVHTALQTDPEAAESAKGRQLRFLANVDPVDVARSIKDLDPETTLVVVVSKT |
| | | | FTTAETMLNARTIKEWIVSSLGPQAVSKHMIAVSTNLKLVKEFGIDPNNAFAFWD |
| | | | WVGGRYSVCSAVGVLPLSLQYGFPIVQKFLEGASSIDNHFRTASFEKNIPVLLGLLS |
| | | | VWNVSFLGYPARAILPYSQALEKLAPHIQQVSMESNGKGVSIDGVPLPYEAGEIDF |
| | | | GEPGTNGQHSFYQLIHQGRVIPCDFIGVIKSQQPVYLKGETVSNHDELMSNFFAQ |
| | | | PDALAYGKTPEQLRSENVSENLIPHKTFKGNRPSLSFLLSSLSAYEIGQLLAIYENRI |
| | | | AVQGFIWGINSFDQWGVELGKSLASQVRKQLHASRMEGKPIEGFNPSSASLLARY |
| | | | LAVEPSTPYDTTVLPKV |
| 682 | 2 | Que_a | QFQMASPTLISDTGAWKDLKGHVEEINKTHLRDLMADAERCKSMMVEFDGVLLD |
| | | | YSRQRATNETVDKLFKLAEEAKLKEKINRMYNGEHINSTENRSVLHVALRASRDAV |
| | | | IKSDGKNVVPEVWSVLDKIKDFSERVRSGSWVGATGKVLKDVVAVGIGGSFLGP |
| | | | LFVHTALQTDPEAIKSARGRQLRFLANVDPIDVARNITGLNPETTLVVVVSKTFTTA |
| | | | ETMLNARTLREWISAALGPSAVAKHMVAVSTNLTLVEKFGIDPNNAFAFWDWVG |
| | | | GRYSVCSAVGVLPLSLQYGFSVVEQFLKGASSIDQHFYSAPHEKNIPVLLGLLSVW |
| | | | NVSFFGYPARAILPYSQALEKFAPHIQQVSMESNGKGVSIDGVPLPFEAGEIDFGEP |
| | | | GTNGQHSFYQLIHQGRVIPCDFIGVVKSQQPVFLKGEVVSNHDELMSNFFAQPDA |
| | | | LAYGKTPEQLHKENVAPHLIPHKTFSGNRPSLSLLLPSLNAYNIGQLLAIYEHRIAVE |
| | | | GFVWGINSFDQWGVELGKSLATQVRKQLHVSRTKGEPVEGFNFSTATLLTRYLEA |
| | | | TADIPADPPTLLPRI |
| 683 | 2 | Que_a | MASPTLISDTGAWKDLKGHVEEINKTHLRDLMADAERCKSMMVEFDGVLLDYSR |
| | | | QRATNETVDKLFKLAEEAKLKEKINRMYNGEHINSTENRSVLHVALRASRDAVIKS |
| | | | DGKNVVPEVWSVLDKIKDFSERVRSGSWVGATGKVLKDVVAVGIGGSFLGPLFV |
| | | | HTALQTDPEAIKSARGRQLRFLANVDPIDVARNITGLNPETTLVVVVSKTFTTAETM |
| | | | LNARTLREWISAALGPSAVAKHMVAVSTNLTLVEKFGIDPNNAFAFWDWVGGRYS |
| | | | VCSAVGVLPLSLQYGFSVVEQFLKGASSIDQHFYSAPHEKNIPVLLGLLSVWNVSF |
| | | | FGYPARAILPYSQALEKFAPHIQQVSMESNGKGVSIDGVPLPFEAGEIDFGEPGTN |
| | | | GQHSFYQLIHQGRVIPCDFIGVVKSQQPVFLKGEVVSNHDELMSNFFAQPDALAY |
| | | | GKTPEQLHKENVAPHLIPHKTFSGNRPSLSLLLPSLNAYNIGQLLAIYEHRIAVEGFV |
| | | | WGINSFDQWGVELGKSLATQVRKQLHVSRTKGEPVEGFNFSTATLLTRYLEATAD |
| | | | IPADPPTLLPRI |
| 684 | 3 | Amb_a | DERENHGNMKRVESDSSLYETEDDGEDGEGNKIVLGPQCTLKEQFEKDKDDESL |
| | | | RKWKEQLLGNVDINNVGESLEPDVKILSLSIVSPGRSDIILPIPESGKPEGRWFTLK |
| | | | EGCHYNLKFSFQVSHNIVAGLKYTNHVWKTGVRVYNIKEMLGTFSPQLEPYTFVTP |
| | | | EETTPSGYFARGSYSAKSRFVDDDNKCYLEINYSFDIRKDWANA |
| 685 | 3 | Amb_p | DEEDTQIQLGPKISIREHLEKDKDDESLRRWKEQLLGSVDVSQVEEVQEPDVKILS |
| | | | LTIISADRPDIVLEIPNPGNPKAPWFTLKEGSKYNLKFSIKVSNDIVCGLRYTNHVW |
| | | | KTGLKVDNSKEMLGTFSPQPEPYTHIMPEEVTPSGFLARGNYSAKTKFFDDDNKCY |
| | | | LELNYTFDIQKDW |
| 686 | 3 | Amb_p | DERENHGNMKRVESDSSLYETEDDGEDGEGNKIVLGPQCTLKEQFEKDKDDESL |
| | | | RKWKEQLLGNVDINNVGESLEPDVKILSLSIVSPGRSDIILPIPESGKPEGRWFTLK |
| | | | EGCHYNLKFSFQVSHNIVAGLKYTNHVWKTGVRVYNIKEMLGTFSPQLEPYTFVTP |
| | | | EETTPSGYFARGSYSAKSKFVDDDNKCYLEINYSFDIRKDWANA |
| 687 | 3 | Amb_p | EPYTYAGEEETTPAGMFARGSYSAKLKFVDDDGKVYLEMSYYFEIRKDWPATQ |
| 688 | 3 | Bet_v | DQEEEDDEGNKLELGPQYTLKQQLEKDKDDESLRRWKEQLLGSVDLNNVGETLD |
| | | | PDVKILSLSIVSPGRSDIVVPIPEDGNPKGLWFTLKEGSKYCLKFSFQVSNNIVSGL |
| | | | KYTNTVWKSGIRVDSSKEMLGTFSPQLEPYVHVMPEESTPSGIFARGSYSAKSKFL |
| | | | DDDNKCYLEINYTFGIRKEW |
| 689 | 3 | Cyn_d | KRTVVLGPQVPLKEQLELDKDDESLRRWKEQLLGQVDTEQLGETAEPEVKVLNLTI |
| | | | LSPGRPDLVLPIPFQPDEKGYAFALKDGSPYSFRFSFIVSNNIVSGLKYTNTVWKTG |
| | | | VRVENQKMMLGTFSPQLEPYVYEGEEETTPAGMFARGSYSAKLKFVDDDGKVYLE |
| | | | MSYYFEIRKEWPAA |
| 690 | 3 | Que_a | TDQEEEDDERSKLQLGPQYTLKEQLEKDKDDESLRRWKEQLLGSVDLNNVGETLE |
| | | | PDVKIFCLSIISPGRSDIVLPIPEDGKPKGIWFTLKEGSKYKLKFSFQVSNNIVSGLK |
| | | | YTNTVWKTGIKVDSSKEMIGTFSPQIEPYTHIMQEETTPSGMFSRGSYSARSKFLD |
| | | | DDNKCYLEINYGFDIRKEWAS |
| 691 | 4 | Amb_a | MANFTVNRVVTSPIEGQKPGTSGLRKKVKVFTQPHYLHNFVQSTFNALSAEKVKG |
| | | | STLVVSGDGRYYSKDAIQIIIKMAAANGVRRVWVGQNGLLSTPAVSAVVRERVGA |
| | | | DGSKANGAFILTASHNPGGPNEDFGIKYNMGNGGPAPEGITDKIFENTKTIKEYFI |
| | | | AEGLPDVDISAIGVSNFSGPGGQFDVDVFDSASDYVKLMKSIFDFQSIKKLITSPQ |
| | | | FSFCFDALHGVGGAYAKRMFVEELGAKESSLLNCVPKEDFGGGHPDPNLTYAKEL |
| | | | VARMGLGTNPDSNPPEFGAAADGDADRNMILGKRFFVTPSDSVAIIAANAVQAIP |
| | | | YFSSGLKGVARSMPTSAALDVVAKSLNLKFFEVPTGWKFFGNLMDAGLCSICGEE |
| | | | SFGTGSDHIREKDGIWAVLAWLSILAHKNKDNLDGGKLVTVEDIVKQHWATFGR |
| | | | HYYTRYDYENVDAGAAKEVMAHLVDLQSSISGVNTTI |
| 692 | 4 | Amb_p | SIFDFQSIKKLITSPQFSFCFDALHGVGGAYAKRMFVEELGAKESSLLNCVPKEDFG |
| | | | GGHPDPNLTYAKELVARMGLGTNPDSNPPEFGAAADGDADRNMILGKRFFVTPSD |
| | | | SVAIIAANAVQAIPYFSSGLKGVARSMPTSAALDVVAKSLNLKFFEVPTGWKFFGN |
| | | | LMDAGLCSICGEESFGTGSDHIREKDGIWAVLAWLSILAHKNKDNLDGGKLVTVE |
| | | | DIVKQHWATFGRHYYTRYDYENVDAGAAKEVMAHLVDLQSSISGVNTTIKGIRSD |
| | | | VADVVSADEFEYKDPVDGSVSKNQGIRYLFEDGSRLVFRLSGTGSEGATIRLYIEQ |
| | | | YEKDSSKTGRDSQEALAPLVDVALKLSKMLEYTGRSAPTVIT |
| 693 | 4 | Bet_v | MVVFKVARVESTPFDGQKPGTSGLRKKVKVFIQPNYLENFVQSTFNALTPEKVRGA |
| | | | TLVVSGDGRYYSKDAIQIIIKMAAANGVRRVWVGQNGLLSTPAVSAVIRERVAVD |
| | | | GSRASGAFILTASHNPGGPHEDFGIKYNMENGGPAPEGLTDKIYENTKTIKEYFIAE |
| | | | DLPDVDITTTGVTRFGGPEGQFDVDVFDSASDYVKLMKSIFDFELIRKLLSSPKFTF |
| | | | CYDALHGVAGAYAKRIFVEELGAQESSLLNCTPKEDFGGGHPDPNLTYAKELVAR |
| | | | MGLGKSNSQDEVPEFGAAADGDADRNMILGKRFFVTPSDSVAIIAANAVQAIPYF |
| | | | SAGLKGVARSMPTSAALDVVAKHLNLKFFEVPTGWKFFGNLMDAGLCSVCGEESF |
| | | | GTGSDHIREKDGIWAVLAWLSILAHKNKENLGGEKLVTVEDIVRQHWATYGRHY |
| | | | YTRYDYENVDAAAAKALMAYLVKLQSSLSEVNEIVKGVRSDVAKVVDADEFEYKD |
| | | | PVDGSISKHQGIRYLFEDGSRLVFRLSGTGSEGATIRLYIEQYEKDPSKIGRDSQE |
| | | | ALAPLVEVALKLSKMQEFTGRGAPTVIT |
| 694 | 4 | Cyn_d | MVLFTVTKKATTPFEGQKPGTSGLRKKVTVFQQPNYLQNFVQATFNALPADQVKG |
| | | | ATIVVSGDGRYFSKDAVQIITKMAAANGVRRVWVGQNSLMSTPAVSCVIRDRVG |
| | | | SDGSKATGAFILTASHNPGGPTEDFGIKYNMGNGGPAPESVTDKIFSNTKTISEYLI |
| | | | SEDLPDVDISVVGVTSFSGPEGPFDVDVFDSSVDYIKLMKSIFDFEATKNLVTSPKF |
| | | | TFCYDALHGVAGAYAKQIFVEELGADESSLLNCVPKEDFGGGHPDPNLTYAKELVE |
| | | | RMGLGKSTSNVEPPEFGAAADGDADRNMILGKRFFVTPSDSVAIIAANAVQSIPYF |
| | | | SSGLKGVARSMPTSAALDVVAKNLNLKFFEVPTGWKFFGNLMDAGMCSICGEESF |
| | | | GTGSDHIREKDGIWAVLAWLSILAFKNKDNLRGDKLVSVEDIVRQHWATYGRHY |
| | | | YTRYDYENVDAGAAKELMANLVSMQSSLSDVNKLIKEIRSDVSDVVAADEFEYKD |
| | | | PVDGSVSKHQGIRYLFGDGSRLVFRLSGTGSVGATIRVYIEQYEKDSSKIGRESQ |
| | | | DALAPLVDVALKLSKMQEYTGRSAPTVIT |
| 695 | 4 | Que_a | MVFKVSRVETKPIDGQKPGTSGLRKKVKVFIQPHYLHNFVQSTFNALTPEKVRGAT |
| | | | LVVSGDGRYYSKDAIQIITKMSAANGVRRVWVGQNGLLSTPAVSAVIRERVGVDG |
| | | | SRASGAFILTASHNPGGPNEDFGIKYNMENGGPAPEGITDKIYENTKTIKEYFISED |
| | | | LPDVDISAVGVTSFAGPEGQFDVEVFDSASDYVKLMKSIFDFESIRKLISSPKFTFC |
| | | | YDALHGVAGAYAKRIFVEELGAQESSLLNCTPKEDFGGGHPDPNLTYAKELVARM |
| | | | GLGKSSSQGEPPEFGAAADGDADRNMILGKRFFVTPSDSVAIIAANAVESIPYFSA |
| | | | GLKGVARSMPTSAALDVVAKHLNLKFFEVPTGWKFFGNLMDAGLCSVCGEESFGT |
| | | | GSDHIREKDGIWAVLAWLSILAHKNKENLGEEKLVSVEDIVRQHWTTYGRHYYTR |
| | | | YDYENVDAGAAKELMAYLVKLQSSLPEVNEIVKGTRSDVSKVINADEFEYKDPVD |
| | | | GSISKHQGIRYLFEDGSRLVFRLSGTGSEGATIRLYIEQYEKDPSKTGRDSQDALA |
| | | | PLVEVALKLSKMQEFTARTAPTVIT |
| 696 | 5_64 | Amb_a | KCYPVVSEEYKKAVDKARKKLRGFIAEKRCAPLMLRLAWHSAGTYDVNTKTGGPF |
| | | | GTMRYKAELSHGANNGLDIAVRLLEPIKEQFPILSYGDFYQLAGVVAVEVTGGPDV |
| | | | PFHPGRVDKEEPPVEGRLPDATKGTDHLRDVFVKTMGLEDIDIVTLSGGHTLGAA |
| | | | HKERSGFEGPWTPNPLIFDNSYFTELLAGEKEGLLKLPTDKALLEDPVFRPLVDKYA |
| | | | ADEDAFFADYAVSHMKLSELGFADA |
| 697 | 5_64 | Amb_a | LAWHSAGTFDVQSKTGGPFGTMRHKAELAHGANNGLDIAVRLLEPLKEQFPEISY |
| | | | ADFYQLAGVVAVEVTGGPEVPFHPGREDKPEPPQEGRLPDATKGCDHLRDVFIKQ |
| | | | MGLTDQDIVALSGGHTLGRCHKERSGFEGPWTANPLVFDNSYFKELLSGEKEGLL |
| | | | QLPTDKALLSDPVFRPFVEKYAADEDAFFADYAEAHLKLSELGF |
| 698 | 5_64 | Amb_p | KSYPCVSEEYKKAVDKARRKLRGFIADKRCAPLMLRLAWHSAGTYDVKTKTGGPF |
| | | | GTMRYKAELSHGANNGLDIAVRLLEPIKEQFPNISYGDFYQLAGVVAVEIAGGPEV |
| | | | PFHPGREDKEEPPLEGRLPDATKGNDHLRDVFVKTMGLDDIDIVTLSGGHTLGAA |
| | | | HKERSGFEGPWTPNPLIFDNSYFTELLAGEKEGLLKLPTDKALLEDPVFRPLVEKYA |
| | | | ADEDAFFADYAVSHMKLSELGFAE |
| 699 | 5_64 | Amb_p | LAWHSAGTFDVQSKTGGPFGTMRHKAELAHGANNGLDIAVRLLEPLKEQFPEISY |
| | | | ADFYQLAGVVAVEVTGGPEVPFHPGREDKPEPPQEGRLPDATKGCDHLRDVFIKQ |
| | | | MGLTDQDIVALSGGHTLGRCHKERSGFEGPWTANPLVFDNSYFKELLSGEKEGLL |
| | | | QLPTDKALLSDPVFRPFVEKYAADEDAFFADYAEAHLKLSELGFADA |
| 700 | 5_64 | Bet_v | DCLWLLWRCSWHSAGTFDVETKTGGPFGTIRHPDELAHEANSGLDIAIRLLEPIKE |
| | | | QFPILSYADFYQLAGVVAVEVTGGPEIPFHPGRPDKTEPPPEGRLPDATKGSDHLR |
| | | | DIFGHMGLSDKDIVALSGGHTLGRCHKERSGFEGPWTNNPLIFDNSYFKELLSGE |
| | | | KEGLIQLPSDKALLEDPVFRPLVEKYAADEDAFFADYAEAHLKLSELGFADA |
| 701 | 5_64 | Cyn_d | KSYPAVSEDYLKAVDKAKRKLRGLIAEKNCAPLILRLAWHSAGTFDVATKSGGPYG |
| | | | TMKNPSEQAHAANAGLDIAVRLLEPIKEQFPILSYADFYQLAGVVAVEVTGGPDVP |
| | | | FHPGREDKPEPPPEGRLPDATKGSDHLRQVFATQMGLSDQDIVALSGGHTLGRCH |
| | | | KDRSGFEGAWTSNPLIFDNSYFKELLSGEKEGLLQLPSDKALLSDPSFRPLVEKYA |
| | | | ADEDAFFADYAEAHLKLSELGFAE |
| 702 | 5_64 | Cyn_d | MAKNYPTVSAEYQEAVEKARRKLRALIAEKSCAPLMLRLAWHSAGTFDVSTKTGG |
| | | | PFGTMKNPAEQAHGANAGLDIAVRMLEPVKEEFPILSYADLYQLAGVVAVEVTGGP |
| | | | EIPFHPGREDKPQPPPEGRLPDATKGTDHLRQVFGKQMGLSDQDIVALSGGHTLG |
| | | | RCHKERSGFEGPWTRNPLCFDNSYFTELLTGDKEGLLQLPSDKALLNDPVFRPLVE |
| | | | KYAADEKAFFEDYKEAHLRLSELGFADA |
| 703 | 5_64 | Que_a | MTKQYPSVSAEYQKTVEKARRKLRGLIAEKHCAPLMLRIAWHSAGTFDQKTKTGG |
| | | | PFGTMKQAAELSHGANNGLDIAVRLLEPIKEQFPTLSYADFYQLAGVVAVEITGGP |
| | | | EVPFHPGREDKPQPPPEGRLPDATKGSDHLRVVFGQQMGLSDQDIVALSGGHTL |
| | | | GRCHKERSGFEGPWTANPLIFDNSYFKELLSGEKEGLLQLPSDKALLADPVFRPLV |
| | | | EKYAADEDAFFADYAEAHLKLSELGFAEA |
| 704 | 6 | Amb_a | EKLNNLRSAVSSLTQISENEKSGFINLVSRYLSGEAEHVEWSKIQTPTDKIVVPYDT |
| | | | LSAVPEDAAETKSLLDKLVVLKLNGGLGTTMGCTGPKSVIEVRNGLTFLDLIVIQIE |
| | | | SLNKKYGCSVPLLLMNSFNTHEDTQKIIEKYAGSNIEIHTFNQSQYPRLVVDDFLPL |
| | | | PSKGETGKDGWYPPGHGDVFPSLMNSGKLDALLSQGKEYVFVANSDNLGAVVDL |
| | | | KILNHLIQNKNEYCMEVTPKTLADVKGGTLISYDGKVQLLEIAQVPDEHVNEFKSIE |
| | | | KFKIFNTNNLWVNLNAIKRLVQADALKMEIIPNPKEVNGVKVLQLETAAGAAIKFFD |
| | | | NAIGINVPRSRFLPVKASSDLLLVQSDLYTEKDGYVIRNPARTDPANPSIELGPEFK |
| | | | KVGDFLKRFKSIPSIIELASLKVSGDVWFGSNVVLKGKVVVAANSGEKLEIPDGAV |
| | | | LENKEVHSAGDI |
| 705 | 6 | Amb_p | YHHSRSKSINQSMAAADTEKLNNLRSAVSSLTQISENEKSGFINLVSRHLSGEAEH |
| | | | VEWSKIQTPTDKIVVPYDTLSAVPEDAAETKSLLDKLVVLKLNGGLGTTMGCTGPK |
| | | | SVIEVRNGLTFLDLIVIQIESLNKKYGCSVPLLLMNSFNTHEDTQKIIEKYAGSNIEI |
| | | | HTFNQSQYPRLVVDDFLPLPSKGETGKDGWYPPGHGDVFPSLMNSGKLDALLSQ |
| | | | GKEYVFVANSDNLGAVVDLKILNHLIQNKNEYCMEVTPKTLADVKGGTLISYDGKV |
| | | | QLLEIAQVPDAHVNEFKSIEKFKIFNTNNLWVNLNAIKRLVQADALKMEIIPNPKEV |
| | | | NGVKVLQLETAAGAAIKFFDNAIGINVPRSRFLPVKASSDLLLVQSDLYTEKDGYVI |
| | | | RNPARTDPANPSIELGPEFKKVGDFLKRFKSIPSIIELASLKVSGDVWFGSNVVLKG |
| | | | KVVVAANSGEKLEIPDGAVLENKEVHSAGDI |
| 706 | 6 | Amb_p | EKLNNLRSAVSSLTQISENEKSGFINLVSRHLSGEAEHVEWSKIQTPTDKIVVPYD |
| | | | TLSAVPEDAAETKSLLDKLVVLKLNGGLGTTMGCTGPKSVIEVRNGLTFLDLIVIQI |
| | | | ESLNKKYGCSVPLLLMNSFNTHEDTQKIIEKYAGSNIEIHTFNQSQYPRLVVDDFLP |
| | | | LPSKGETGKDGWYPPGHGDVFPSLMNSGKLDALLSQGKEYVFVANSDNLGAVVD |
| | | | LKILNHLIQNKNEYCMEVTPKTLADVKGGTLISYDGKVQLLEIAQVPDAHVNEFKSI |
| | | | EKFKIFNTNNLWVNLNAIKRLVQADALKMEIIPNPKEVNGVKVLQLETAAGAAIKFF |
| | | | DNAIGINVPRSRFLPVKASSDLLLVQSDLYTEKDGYVIRNPARTDPANPSIELGPEF |
| | | | KKVGDFLKRFKSIPSIIELASLKVSGDVWFGSNVVLKGKVVVAANSGEKLEIPDGA |
| | | | VLENKEVHSAGDI |
| 707 | 6 | Ant_o | PHPTSDRPSSILSSPSARTTHLATMADEKLAKLREAVAGLGQISDNEKSGFISLVS |
| | | | RYLSGDEEHIEWPKIHTPTDEVVVPYDTIDAPPEDLEATKALLNKLAVLKLNGGLGT |
| | | | TMGCTGPKSVIEVRNGFTFLDLIVLQIESLNKKYGSNVPLLLMNSFNTHDDTLKIVE |
| | | | KYANSSIDIHTFNQSQYPRVVADEFLPWPSKGKTDKDGWYPPGHGDIFPSLMNS |
| | | | GKLDLLLSQGKEYVFIANSDNLGAIVDMKILNHLIHKQNEYCMEVTPKTLADVKGG |
| | | | TLISYEGRVQLLEIAQVPDAHVDEFKSIEKFKIFNTNNLWVNLKAIKRLVEADALKM |
| | | | EIIPNPKEVEGVKVLQLETAAGAAIRFFDHAIGINVPRSRFLPVKATSDLQLVQSDL |
| | | | YTLVDGFVTRNSARTDPSNPSIELGPEFKKVGSFLGRFKSIPSIVELDSLKVSGDV |
| | | | WFGSGIVLKGKVTITAKPGVKLEIPDGAVLENKDIKGAEDL |
| 708 | 6 | Bet_v | EKLNKLKSAVDGLNQISENEKIGCINLVARYLSGEAQHVEWSKIQTPTDEIVVPYE |
| | | | SLAPTTDDPVETKKLLDKLVVLKLNGGLGTTMGCTGPKSVIEVRNGLTFLDLIVIQI |
| | | | ENLNSKYGCNVPLLLMNSFNTHDDTLKIVERYSGSKVEIHTFNQSQYPRLVVDDFS |
| | | | PLPSKGQTGKDGWYPPGHGDVFPSLKNSGKLDALLSQGKEYVFIANSDNLGAVV |
| | | | DLKILNHLVHNKNEYCMEVTPKTLADVKGGTLISYEGRVQLLEIAQVPDDHVNEFK |
| | | | SIEKFKIFNTNNLWVNLKAIKRLVETDALKMEIIPNPKEVDGIKVLQLETAAGAAIKF |
| | | | FDDAIGINVPRSRFLPVKATSDLLLVQSDLYTLEDGFVIRNEARKNPANPSIELGPE |
| | | | FKKVGNFLSRFKSIPSIIELDSLKVAGDVWFGTGVTLKGKVSIVAKPGVKLEIPDGA |
| | | | VLENKEINGPEDL |
| 709 | 6 | Bet_v | PFSFQFSFTSITMASEMATHLKPNGGAEFEKRHHGKTQSHVAFENTSTSVAASQM |
| | | | RNALNNLCDEVTDPAEKQRFETEMDNFFALFRRYLNDKAKGNEIEWSRIAPPKPEQ |
| | | | VVAYEDLPQQESVDFLNKLAVLKLNGGLGTSMGCVGPKSVIEVRDGMSFLDLSVR |
| | | | QIEYLNRTYGVNVPFVLMNSFNTDSDTANIIKKYEGHNIDIMTFNQSRYPRVLKDS |
| | | | LLPAPKSANSQISDWYPPGHGDVFESLYNSGILDKLLERGVEIVFLSNADNLGAVV |
| | | | DLKILQHMVDTKAEYIMELTDKTKADVKGGTIIDYEGQARLLEIAQVPKEHVNEFK |
| | | | SIKKFKYFNTNNIWMNLRAVKRIVENNELAMEIIPNGKSIPADKKGEADVSIVQLET |
| | | | AVGAAIRHFHNAHGVNVPRRRFLPVKTCSDLMLVKSDLYTLKHGQLIMDPNRFGP |
| | | | APLIKLGGDFKKVSSFQSRIPSIPKILELDHLTITGPVNLGRGVTCKGTVIIVASEGQ |
| | | | TIDIPPGSILENVVVQGSLRLLEH |
| 710 | 6 | Bet_v | LAGSLRMTIHSVVIQKLLSTNAHLGRRVAADHFKAYTYGIRNGMAIIDSDKTLIALR |
| | | | SACAFIGAMARQKARFMFVNTNPLFDEIFEQMTKRIGLYNPNQNSLWRTGGFLTN |
| | | | SFSPKRFRSRNKKLCFAPAQPPDCVVILDTERKSSVIFEAEKLQIPVVALVDSSMPL |
| | | | DVYKRIAYPVPANDSVQFVYLFCNLITKTFLLEQKRFGGTAREDSAAAIPSADDASK |
| | | | IENHREEVKRIEERESDSVGYAKDEVLVVPYESLTPVSGDGAEIKELLDKLVVLKFN |
| | | | GTLGTELGFDGPKSAIEVCNGLTFLDLIVNQIESLNSKYGCNVPLLLMNTIKTNDDS |
| | | | VKVLEKYPKSNIVMLKSFDGQTCEKESYPSDHDMEFLSLMKGGTLDVLLSQGKEYI |
| | | | LVVGSDNVAAGIDPKILKHLVQNKIEYCMEVTPTTSFGKDNDILNSSQQKFQLAKI |
| | | | ARNSAPHSMDKFKLVDTRSLWLNLRATKRLVDTDALNFENYSVSKGRETAAGSTI |
| | | | RFFDRAIGINVPQ |
| 711 | 6 | Bet_v | AMAAATLNTADAEKLNKLKSAVDGLNQISENEKIGCINLVARYLSGEAQHVEWSK |
| | | | IQTPTDEIVVPYESLAPTTDDPVETKKLLDKLVVLKLNGGLGTTMGCTGPKSVIEVR |
| | | | NGLTFLDLIVIQIENLNSKYGCNVPLLLMNSFNTHDDTLKIVERYSGSKVEIHTFNQ |
| | | | SQYPRLVVDDFSPLPSKGQTGKDGWYPPGHGDVFPSLKNSGKLDALLSQGKEYVF |
| | | | IANSDNLGAVVDLKILNHLVHNKNEYCMEVTPKTLADVKGGTLISYEGRVQLLEIA |
| | | | QVPDDHVNEFKSIEKFKIFNTNNLWVNLKAIKRLVETDALKMEIIPNPKEVDGIKVL |
| | | | QLETAAGAAIKFFDDAIGINVPRSRFLPVKATSDLLLVQSDLYTLEDGFVIRNEARK |
| | | | NPANPSIELGPEFKKVGNFLSRFKSIPSIIELDSLKVAGDVWFGTGVTLKGKVSIVA |
| | | | KPGVKLEIPDGAVLENKEINGPEDL |
| 712 | 6 | Cyn_d | PTPSSSSHLPVSSPLPDLSAHLAMADEKLAKLSEAVAGLAEISENEKSGFLSLVSRY |
| | | | LSGDEEHIEWAKIHTPTDEVVVPYDALETPPEDIEETKKLLDKLAVLKLNGGLGTTM |
| | | | GCTGPKSVIEVRNGFTFLDLIVLQIEALNKKYGSNVPLLLMNSFSTHDDTLKIVEKY |
| | | | ANSNIDIHTFNQSKYPRVVADEFLPWPSKGKTCKDGWYPPGHGDIFPSLMNSGKL |
| | | | DLLLSQGKEYVFIANSDNLGAIVDMKILNHUHKQNEYCMEVTPKTLADVKGGTLI |
| | | | SYEGRVQLLEIAQVPDAHVHEFKSIEKFKIFNTNNLWVNLKAIKRLVEADALKMEII |
| | | | PNPKEVDGVKVLQLETAAGAAIRFFDHAIGINVPRSRFLPVKATSDLQLVQSDLYTL |
| | | | VDGLVTRNEARTNPSNPSIELGPEFKKVGNFLGRFKSIPSIVELDSLKVSGDVWFG |
| | | | SGIVLKGKVSITAKPGVKLEIPDGAVIENKDISGPEDL |
| 713 | 6 | Cyn_d | MADEKLAKLSEAVAGLAEISENEKSGFLSLVSRYLSGDEEHIEWAKIHTPTDEVVV |
| | | | PYDALETPPEDIEETKKLLDKLAVLKLNGGLGTTMGCTGPKSVIEVRNGFTFLDLIVL |
| | | | QIEALNKKYGSNVPLLLMNSFSTHDDTLKIVEKYANSNIDIHTFNQSKYPRVVADE |
| | | | FLPWPSKGKTCKDGWYPPGHGDIFPSLMNSGKLDLLLSQGKEYVFIANSDNLGAI |
| | | | VDMKILNHLIHKQNEYCMEVTPKTLADVKGGTLISYEGRVQLLEIAQVPDAHVHEF |
| | | | KSIEKFKIFNTNNLWVNLKAIKRLVEADALKMEIIPNPKEVDGVKVLQLETAAGAAI |
| | | | RFFDHAIGINVPRSRFLPVKATSDLQLVQSDLYTLVDGLVTRNEARTNPSNPSIELG |
| | | | PEFKKVGNFLGRFKSIPSIVELDSLKVSGDVWFGSGIVLKGKVSITAKPGVKLEIPD |
| | | | GAVIENKDISGPEDL |
| 714 | 6 | Fra_e | LYSKMSTATLSAADKEKITKLQSAVSGLNQISENEKVGFVNLVTRYLSGEAQHVE |
| | | | WSKIQTPTDEVVVPYDTLTPVPEDPAETKKLLDKLVVLKLNGGLGTTMGCTGPKSV |
| | | | IEVRNGLTFLDLIVIQIETLNKKYGCSVPLLLMNSFNTHDDTLKIVEKYTNSNIEIHT |
| | | | FNQSQYPRLAIDNFTPLPCIKDAGKDGWYPPGHGDVFPSLVNSGKLEALLSQGKE |
| | | | YVFVANSDNLGAVVDLKILNHLISNKNEYCMEVTPKTLADVKGGTLISYEGKVQLL |
| | | | EIAQVSDEHVNEFKSIEKFKIFNTNNLWVNLNAIKRLVQADALKMEIIPNPKEVDGI |
| | | | KVLQLETAAGAAIRFFDRAIGINVPRSRFLPVKATSDLLLVQSDLYTLSDGFVTRNP |
| | | | ARTNPANPSIELGPEFKKVANFLSRFKSIPSIIELDSLKVTGDVWFGSGIALKGKVTI |
| | | | AAKPGVKLEIPDGAVIANKDINGPEDI |
| 715 | 6 | Fra_e | LYSKMSTATLSAADKEKITKLQSAVSGLNQISENEKVGFVNLVTRYLSGEAQHVE |
| | | | WSKIQTPTDEVVVPYDTLTPVPEDPAETKKLLDKLVVLKLNGGLGTTMGCTGPKSV |
| | | | IEVRNGLTFLDLIVIQIETLNKKYGCSVPLLLMNSFNTHDDTLKIVEKYTNSNIEIHT |
| | | | FNQSQYPRLAIDNFTPLPCIKDAGKDGWYPPGHGDVFPSLVNSGKLEALLSQGKE |
| | | | YVFVANSDNLGAVVDLKILNHLISNKNEYCMEVTPKTLADVKGGTLISYEGKVQLL |
| | | | EIAQVSDEHVNEFKSIEKFKIFNTNNLWVNLNAIKRLVQADALKMEIIPNPKEVDGI |
| | | | KVLQLETAAGAAIRFFDRAIGINVPRSRFLPVKATSDLLLVQSDLYTLSDGFVTRNP |
| | | | ARTNPANPSIELGPEFKKVANFLSRFKSIPSIIELDSLKVTGDVWFGSGIALKGKVTI |
| | | | AAKPGVKLEIPDGAVIANKEINGPQDI |
| 716 | 6 | Lol_p | LISYEGKVQLLEIAQVPDEHVNEFKSIEKFKIFNTNNLWVNLNAIKRLVQADALKME |
| | | | IIPNPKEVDGIKVLQLETAAGAAIKFFDRAIGINVPRSRFLPVKATSDLLLVQSDLYT |
| | | | LSDGFVTRNPARTNPANPSIELGPE |
| 717 | 6 | Lol_p | SPSPTSDDPPLPFPQKHLPPHVHATMADEKLAKLREAVAGLGQISDNEKSGFISLV |
| | | | SRYLSGDEEHIEWPKIHTPTDEVVVPYDTIDAPPEDLEATKALLNKLAVLKLNGGLG |
| | | | TTMGCTGPKSVIEVRNGFTFLDLIVLQIESLNKKYGSNVPLLLMNSFNTHDDTLKIV |
| | | | EKYANSSIDIHTFNQSQYPRVVADEFLPWPSKGKTDKDGWYPPGHGDIFPSLMNS |
| | | | GKLDLLLSQGKEYVFIANSDNLGAIVDMKILNHLIHKQNEYCMEVTPKTLADVKGG |
| | | | TLISYEGRVQLLEIAQVPDAHVDEFKSIEKFKIFNTNNLWVNLKAIKRLVEADALKM |
| | | | EIIPNPKEVEGVKVLQLETAAGAAIRFFDHAIGMNVPRSRFLPVKATSDLQLVQSDL |
| | | | YTLVDGFVTRNSARTDPSNPSIELGPEFKKVGSFLGRFKSIPSIVELDSLKVSGDV |
| | | | WFGSGIVLKGKVTITAKPGVKLEIPDGKVIENKDINGVEDL |
| 718 | 6 | Lol_p | THHHHHLTTSSHLKSPPVLSSSSASRSLLCLPARIAMAATAVAAGPDAKIEKFRDA |
| | | | VAKLDEISENEKAGCISLVSRYLSGEAEQIEWSKIQTPTDEVVVPYDTLAPAPEDLD |
| | | | AMKALLDKLVVLKLNGGLGTTMGCTGPKSVIEVRNGFTFLDLIVIQIESLNKKYGC |
| | | | DVPLLLMNSFNTHDDTQKIVEKYSNSNINIHTFNQSQYPRIVTEDFLPLPSKGKSG |
| | | | KDGWYPPGHGDVFPSLNNSGKLDTLLSQGKEYVFVANSDNLGAIVDIKILNHLIN |
| | | | NQNEYCMEVTPKTLADVKGGTLISYEGRVQLLEIAQVPDEHVNEFKSIEKFKIFNTN |
| | | | NLWVNLKAIKRLVEADALKMEIIPNPKEVDGVKVLQLETAAGAAIRFFEKAIGINGP |
| | | | RSRFLPVKATSDLLLVQSDLYTLVDGYVIRNPARVKPSNPSIELGPEFKKVASFLAR |
| | | | FKSIPSIVELDSLKVSGDVTFGSGVVLKGNVTIAAKSGVKLEIPDGAVLENKDINGP |
| | | | EDL |
| 719 | 6 | Ole_e | EMATATLSATDNEKISKLQSSVSGLNQISENEKAGFLNLVTRYLSGEAQHVEWSKI |
| | | | QTPTDEVVVPYDTLAPVPEDHAETKKLLSKLVVLKLNGGLGTTMGCTGPKSVIEVR |
| | | | NGLTFLDLIVIQIETLNKKYGCSVPLLLMNSFNTHDDTLKIVEKYANSNIEIHTFNQS |
| | | | QYPRLAVDNFTPLPCIKDAGKDGWYPPGHGDVFPSLMNSGKLEALLSQGKEYVFV |
| | | | ANSDNLGAVVDMKILNHLINNKNEYCMEVTPKTLADVKGGTLISYEGKVQLLEIAQ |
| | | | VPDEHVNEFKSIEKFKIFNTNNLWVNLNAIKRLVQADALKMEIIPNPKEVDGIKVLQ |
| | | | LETAAGAAIKFFDRAIGINVPRSRFLPVKATSDLLLVQSDLYTLSDGFVTRNPARTN |
| | | | PANPSIELGPEFKKVANFLSRFKSIPSIIDLDSLKVTGDVWFGSGITLKGKVTIAAKP |
| | | | GVKLEIPDGAVIANKEINGPEDI |
| 720 | 6 | Pla_l | KEMAAATLSQADAEKLSKLTSSVATLDGISENEKSGFISLVGRYLSGEAQHVEWS |
| | | | KIQTPTDEVVVPYDTMSPVPEDPAETKKLLDKLVVLKLNGGLGTTMGCTGPKSVIE |
| | | | VRNGLTFLDLIVVQIESLNAKYGCSVPLLLMNSFNTHDDTLKIVEKYSNSKIEIHTF |
| | | | NQSQYPRMVVEDFSPLPTKISGKDAWYPPGHGDVFPALMNSGKLDALIAQGKEYV |
| | | | FVANSDNLGAVVDLKILNHLVNNKNEYCMEVTPKTLADVKGGTLISYEGKVQLLEI |
| | | | AQVPDEHVNEFKSIEKFKIFNTNNLWVNLQSIKKLVQGDVLKMEIIPNPKEVEGIKI |
| | | | LQLETAAGAAIRFFDHAIGANVPRARFLPVKATSDLLLVQSDLYTLSDGFVLRNPAR |
| | | | TNPENPSIELGPEFKKVANFLGRFKSIPSIIGLDSLKVSGDVWFGAGITLKGKVTIA |
| | | | AKSGTKLEIPDGAVIADKEINGPEDI |
| 721 | 6 | Poa_p | DLQLVQSDLYTLVDGLVTRNEARTNPSNPSIELGPEFKKVGNFLGRFKSIPSIVELD |
| | | | SLKVSGDVWFGSGIILKGKVTIT |
| 722 | 6 | Poa_p | VNVAAFPHFPPATCSSLFSGINSQRHLLLLPPSTLLFPHIYLPLPSVRTRTHLAATMA |
| | | | DEKLAKLGEAVTGLPQISDNEKSGFISLVSRYLSGDEEHIEWPKIHTPTDEVVVPY |
| | | | DAIDAPPEDLEATKALLDKLAVLKLNGGLGTTMGCTGPKSVIEVRNGFTFLDLIVLQ |
| | | | IESLNKKYGSNVPLLLMNSFNTHDDTLKIVEKYANSSIDIHTFNQSQYPRVVADEFL |
| | | | PWPSKGKTDKDGWYPPGHGDIFPSLMNSGKLDLLLSQGKEYVFIANSDNLGAIVD |
| | | | MKILNHLIHKQNEYCMEVTPKTLADVKGGTLISYEGRVQLLEIAQVPDAHVDEFKS |
| | | | IEKFKIFNTNNLWVNLKAIKRLVEADALKMEIIPNPKEIDGVKVLQLETAAGAAIRFF |
| | | | DHAIGINVPRSRFLPVKATSDLQLVQSDLYTLVDGFVTRNSARTDPSNPSIELGPEF |
| | | | KKVGSFLGRFKSIPSIVELESLKVSGDVWFGSGIVLKGKVTITAKPGVKLEIPDGAV |
| | | | LENKDINGAEDL |
| 723 | 6 | Que_a | TMAAPTLSAADAEKLNSLKSSVAALPQISENEKNGFINLIARFLSGEAQHVDWSKI |
| | | | QTPTDEVVVPYDTLKPAPHDPAETKKLLDKLVVLKLNGGLGTTMGCTGPKSVIEVR |
| | | | NGLTFLDLIVIQIENLNKQYGCNVPLLLMNSFNTHDDTQKIVEKYSGANVEIHTFN |
| | | | QSQYPRLVVEDFSPLPSKGVTGKDGWYPPGHGDVFPSLRNSGKLDLLLSQGKEYV |
| | | | FIANSDNLGAVVDLKILNHLVHNKNEYCMEVTPKTMADVKGGTLISYEGRVQLLEI |
| | | | AQVPDEHVNEFKSIEKFKIFNTNNLWANLKAIKRLVEADALKMEIIPNPKEVEGIKV |
| | | | LQLETAAGAAIRFFDNAIGNNVPRSRFLPVKATSDLLLVQSDLYTLEDGFVIRNKAR |
| | | | TNPANPSIELGPEFKKVGNFLNRFKSIPSIVELDSLKVTGDVWFGANITLKGKVTIV |
| | | | AKPGAKLEIPDGAVLENKEINGPEDI |
| 724 | 6 | Que_a | TPKPPNETVTMTIHSVVIQKLLSTNAHLGRRVVADHLKPYAYGVRNGMAILDSDKT |
| | | | LISLRTACAFIGALARNNARFMFVNTNPLFDEIFDQMTKKIHLYNPNQNTLWRTGG |
| | | | FLTNSRSPKKFRSRNKKLCFAPPQPPDCVVILDTERKSSVVLEADRLQIPVVAIVDS |
| | | | SMPLDIYKRIAYPVPANDSVQFVYLFCNLITKTFLAEQKRFAKHDSIAVDDDSSKIE |
| | | | NTEEAKRVEESEKVGVSPKDEVVVVPYESLAPISQDRAEAKELLEKLVVLKFNGAL |
| | | | GKEMGFNGPKSVIEVCKGSTVLDLIVKQIESLNSKYGCNVPLLLMNTAKTNDDTVK |
| | | | VVEKYPNSNIVTLNTSDGQASENEAYPSDHDMVFLSLMNGGTLDVLLSQGKEYIL |
| | | | VVGSDNVAAVVDPNILNHLIQNKLEYCMEVTPTTLFDTNNSILNSHQQKFQLAEIA |
| | | | RNSNEHLADKFKLTDTRSLWVNLRAIKRLVDTDALKIENYTVSKGGKNDKILSPKT |
| | | | AAGSAIQFFDHAIGINVPQSRYLPMNATSDLLLLQSDLYTSNNGVLVRNSARTNPL |
| | | | NPSIILGPEFGKVSDLLSRFKSFPSIVELDSLKVTGDVWFGADVTLKGRVNIVAKPG |
| | | | MKLEIPDRAVLHNKDISDPIDI |
| 725 | 6 | Que_a | EKLNSLKSSVAALPQISENEKNGFINLIARFLSGEAQHVDWSKIQTPTDEVVVPYD |
| | | | TLKPAPHDPAETKKLLDKLVVLKLNGGLGTTMGCTGPKSVIEVRNGLTFLDLIVIQI |
| | | | ENLNKQYGCNVPLLLMNSFNTHDDTQKIVEKYSGANVEIHTFNQSQYPRLVVEDF |
| | | | SPLPSKGVTGKDGWYPPGHGDVFPSLRNSGKLDLLLSQGKEYVFIANSDNLGAVV |
| | | | DLKILNHLVHNKNEYCMEVTPKTMADVKGGTLISYEGRVQLLEIAQVPDEHVNEFK |
| | | | SIEKFKIFNTNNLWANLKAIKRLVEADALKMEIIPNPKEVEGIKVLQLETAAGAAIRF |
| | | | FDNAIGNNVPRSRFLPVKATSDLLLVQSDLYTLEDGFVIRNKARTNPANPSIELGPE |
| | | | FKKVGNFLNRFKSIPSIVELDSLKVTGDVWFGANITLKGKVTIVAKPGAKLEIPDGA |
| | | | VLENKEINGPEDI |
| 726 | 7 | Amb_a | DDKVTVESAEATLKYNVAIKCATITPDEARMKEFTLKSMWKSPNGTIRNILNGTVF |
| | | | REPILCKNIPRLIPGWTKPICIGRHAFGDQYKATDAVIKGPGKLKMVFVPEGEGENT |
| | | | ELEVYNFTGAGGVALSMYNTDESITAFAEASMNTAYLKKWPLYLSTKNTILKKYDG |
| | | | RFKDIFQEVYEKNWKSKFEAAGIWYEHRLIDDMVAYALKSDGGYVWACKNYDGD |
| | | | VQSDFLAQGFGSLGLMTSVLVCPDGKTIEAEAAHGTVTRHYRVHQKGGETSTNSI |
| | | | ASIFAWTRGLAHRAKLDDNAKLLDFTEKLEAACIGCVESGKMTKDLALIIHGSKLS |
| | | | REHYLNTEEFIDAVADELKARLSSN |
| 727 | 7 | Amb_p | GDEMTRVFWESIKNKLIFPFLDLDIKYYDLGLLNRDATDDKVTVESAEATLKYNVAI |
| | | | KCATITPDEARMKEFTLKSMWKSPNGTIRNILNGTVFREPILCKNIPRLIPGWTKPI |
| | | | CIGRHAFGDQYKATDAVIKGPGKLKMVFVPEGEGENTELEVYNFTGAGGVALSMY |
| | | | NTDESITAFAEASMNTAYLKKWPLYLSTKNTILKKYDGRFKDIFQEVYEKNWKSKF |
| | | | EAAGIWYEHRLIDDMVAYALKSDGGYVWACKNYDGDVQSDFLAQGFGSLGLMTS |
| | | | VLVCPDGKTIEAEAAHGTVTRHYRVHQKGGETSTNSIASIFAWTRGLAHRAKLDD |
| | | | NAKLLDFTEKLEAACIGCVESGKMTKDLALITHGSKLSREHYLNTEEFIDAVADELK |
| | | | ARLSSN |
| 728 | 7 | Amb_p | SVNKMGFEKIKVANPIVEMDGDEMTRVFWESIKNKLIFPFLDLDIKYYDLGLLNRD |
| | | | ATDDKVTVESAEATLKYNVAIKCATITPDEARMKEFTLKSMWKSPNGTIRNILNGT |
| | | | VFREPILCKNIPRLIPGWTKPICIGRHAFGDQYKATDAVIKGPGKLKMVFVPEGEGE |
| | | | NTELEVYNFTGAGGVALSMYNTDESITAFAEASMNTAYLKKWPLYLSTKNTILKKY |
| | | | DGRFKDIFQEVYEKNWKSKFEAAGIWYEHRLIDDMVAYALKSDGGYVWACKNYD |
| | | | GDVQSDFLAQGFGSLGLMTSVLVCPDGKTIEAEAAHGTVTRHYRVHQKGGETST |
| | | | NSIASIFAWTRGLAHRAKLDDNAKLLDFTEKLEAACIGCVESGKMTKDLALITHGS |
| | | | KLSREHYLNTEEFIDAVADELKARLSSN |
| 729 | 7 | Amb_p | YNFTGAGGVAIAMYNTDESIRAFAEASMNTAYQKKWPLYLSTKNTILKKYDGRFK |
| | | | DIFQEVYEANWKSKYEAAGISYAVFC |
| 730 | 7 | Ant_o | CRRPPTHLPRLAPLRSRSPRQAAPAEAAMAFEKIKVANPIVEMDGDEMTRVFWQSI |
| | | | KDKLIFPFLDLDIKYYDLGVLHRDATDDKVTVEAAEATLKYNVAIKCATITPDEDRV |
| | | | KEFNLKQMWRSPNGTIRNIINGTVFREPIICKNVPKLVPGWTKPICIGRHAFGDQY |
| | | | RATDAVLKGPGKLRLVFEGKDETVDLEVFNFTGAGGVALAMYNTDESIQGFAEAS |
| | | | MATAYEKKWPLYLSTKNTILKKYDGRFKDIFQAVYEAGWKSKYEAAGIWYEHRLID |
| | | | DMVAYALKSEGGYVWACKNYDGDVQSDFLAQGFGSLGLMTSVLMCPDGKTIEAE |
| | | | AAHGTVTRHYRVHQKGGETSTNSIASIFAWTRGLAHRAKLDDNARLLDFTQKLED |
| | | | ACVGTVESGKMTKDLALLVHGSSKVTRGDYLNTEEFIDAVAAELQSRLAAN |
| 731 | 7 | Bet_v | GDEMTRVFWKSIKDKLIFPFVELDIKYFDLGLPHRDATDDKVTIESAEATLKYNVAI |
| | | | KCATITPDEDRVKEFKLKQMWKSPNGTIRNILNGTVFREPIICKNIPRLVPSWNKPI |
| | | | CIGRHAFGDQYRATDTVIKGAGKLKLVFVPEGKEEKTELEVYNFTGAGGVALSMYN |
| | | | TDESIRSFAEASMNTAYQKKWPLYLSTKNTILKKYDGRFKDIFQEVYVANWKSKYE |
| | | | AAGIWYEHRLIDDMVAYALKSDGGYVWACKNYDGDVQSDFLAQGFGSLGLMTS |
| | | | VLVCPDGKTIEAEAAHGTVTRHFRVHQKGGETSTNSIASIFAWSRGLAHRAKLDE |
| | | | NPRLLDFTEKLEAACIGVVESGKMTKDLALIIHGPKLAREHYLNTEEFIDAVAAELR |
| | | | ARLSA |
| 732 | 7 | Bet_v | KVRQKPRMLSPRATTTLRLSAMSGAKMLTSSCSSSASSSMALRSPRLHLQFPSSG |
| | | | PKLSNGVVLRGNRVSFASSSTRFAHASLRCYASSAGSDRVRVENPIVEMDGDEMT |
| | | | RIIWKMIKDKLIFPYLDLDIKYFDLGISNRDATDDKVTVESAEAALKYNVAVKCATI |
| | | | TPDETRVKEFGLKSMWRSPNGTIRNILNGTVFREPIICCNIPRIITGWKKPICIGRH |
| | | | AFGDQYRATDTVIEGPGKLKMVFVPEDGSTPVELDVFDFKGPGVALAMYNVDESI |
| | | | RVFAESSMSLAFAKKWPLYLSTKNTILKKYDGRFKDIFQEVYEEKWKQMFEENSI |
| | | | WYEHRLIDDMVAYAIKSEGGYVWACKNYDGDVQSDLLAQGFGSLGLMASVLLSS |
| | | | DGKTLEAEAAHGTVTRHFRLHQKGQETSTNSIASIFAWTRGLEHRGKLDKNERLL |
| | | | DFVHKLEAACIETVEMGKMTKDLAILIHGSKVSREHYLNTEEFIDAVAQNLEVKLRE |
| | | | PAPVTL |
| 733 | 7 | Bet_v | ATLKYNVAIKCATITPDEDRVKEFNLKQMWKSPNGTIRNILNGTVFREPIICKNIPR |
| | | | LVPGWTKPICIGRHAFGDQYRATDTVIKGSGKLKLVFVPDGHYEKKEFEVFNFTGA |
| | | | GGVALSMYNTDESIRSFAEASMNTAYQKKWPLYL |
| 734 | 7 | Bet_v | ETSTNSIASIFAWTRGLAHRAKLDGNARLLDFTENLEAACVGVVESGKMTKDLALL |
| | | | IHGPKVTRSKYLNTEEFIDHVAEELRARLFTKAKL |
| 735 | 7 | Bet_v | FNIKGSSCLSTFAPLSPSIFVFVPIPARLSLFRAFREKMALEKIKVANPIVEMDGDEM |
| | | | TRVFWKSIKDKLIFPFVELDIKYFDLGLPHRDATDDKVTIESAEATLKYNVAIKCATI |
| | | | TPDEDRVKEFKLKQMWKSPNGTIRNILNGTVFREPIICKNIPRLVPSWNKPICIGRH |
| | | | AFGDQYRATDTVIKGAGKLKLVFVPEGKEEKTELEVYNFTGAGGVALSMYNTDESI |
| | | | RSFAEASMNTAYQKKWPLYLSTKNTILKKYDGRFKDIFQEVYVANWKSKYEAAGI |
| | | | WYEHRLIDDMVAYALKSDGGYVWACKNYDGDVQSDFLAQGFGSLGLMTSVLVC |
| | | | PDGKTIEAEAAHGTVTRHFRVHQKGGETSTNSIASIFAWSRGLAHRAKLDENPRL |
| | | | LDFTEKLEAACIGVVESGKMTKDLALIIHGPKLAREHYLNTEEFIDAVAAELRARLS |
| | | | A |
| 736 | 7 | Cyn_d | PTPFHRRRRLPTRLAARPFPISEASCAVTAAMAFEKIKVANPIVEMDGDEMTRVFW |
| | | | KSIKDKLIFPFLDLDIKYYDLGILHRDATDDKVTVEAAEATLKYNVAIKCATITPDET |
| | | | RVKEFNLKHMWRSPNGTIRNIINGTVFREPIICKNVPRLVPGWTKPICIGRHAFGD |
| | | | QYRATDAVLKGPGKLKLVFEGKEEQIDLEVFNFTGAGGVALSMYNTDESVRAFAA |
| | | | ASMTMAYEKKWPLYLSTKNTILKKYDGRFKDIFQEVYEADWKSKFEAAGIWYEHR |
| | | | LIDDMVAYALKSEGGYVWACKNYDGDVQSDFLAQGFGSLGLMTSVLVCPDGKTI |
| | | | EAEAAHGTVTRHFRVHQKGGETSTNSIASIFAWTRGLAHRAKLDDNARLLDFAQK |
| | | | LEAACVGTVESGKMTKDLALLVHGSSKVTRSDYLNTEEFIDAVAAELQSRLAAN |
| 737 | 7 | Cyn_d | RLASPLARLPLPAARVFRGVSLRCYAAAAAVAEQHRIKVDNPIVEMDGDEMTRVIW |
| | | | KMIKDKLILPYLDVDLKYYDLGILNRDATDDRVTVESAEATREYNVAVKCATITPDE |
| | | | TRVKEFNLKSMWRSPNGTIRNILNGTVFREPILCKNIPRILSGWKHPICIGRHAFGD |
| | | | QYRATDMIIDGPGKLKMVFVPDGGAEPVELDVYDFKGPGVALSMYNVDESIRAFA |
| | | | ESSMAMAFSKKWPLYLSTKNTILKTYDGRFKDIFQEVYEENWRGKFEENSIWYEH |
| | | | RLIDDMVAYAVKSEGGYVWACKNYDGDVQSDFLAQGFGSLGLMTSVLLSSDGKT |
| | | | LESEAAHGTVMRHFRLHQKGQETSTNSIASIFAWTRGLEHRAKLDKNERLLDFTR |
| | | | KLESACVETVESGKMTKDLALLIYGPKVTREFYLNTEEFIDAVAHQLREKIQIPAAV |
| 738 | 7 | Cyn_d | SPTQSRPAMAFNKIKVANPVVEMDGDEMTRVFWKSIKDKLIFPFVDLDIKYFDLGL |
| | | | PHRDATDDKVTVEAAEATLKYNVAIKCATITPDEARVKEFNLKSMWRSPNGTIRNI |
| | | | LNGTVFREPIICQNIPRLVPGWTKPICIGRHAFGDQYRATDAVIKGPGKLKLVYEGK |
| | | | EEQVELEVFNFTGAGGVALAMYNTDESIRSFAEASMATAYEKKWPLYLSTKNTILK |
| | | | KYDGRFKDIFQEVYEAEWRSKYEAAGIWYEHRLIDDMVAYALKSEGGYVWACKN |
| | | | YDGDVQSDFLAQGFGSLGLMTSVLVCPDGKTMEAEAAHGTVTRHYRVHQKGGET |
| | | | STNSIASIFAWTRGLAHRAKLDDNARLLDFTQKLEAACIGAVESGKMTKDLALLVH |
| | | | GSSNVTRSHYLNTEEFIDAVAEELRSRLGANSNL |
| 739 | 7 | Cyn_d | GDEMTRVFWKSIKDKLIFPFLDLDIKYYDLGILHRDATDDKVTVEAAEATLKYNVAI |
| | | | KCATITPDETRVKEFNLKHMWRSPNGTIRNIINGTVFREPIICKNVPRLVPGWTKPI |
| | | | CIGRHAFGDQYRATDAVLKGPGKLKLVFEGKEEQIDLEVFNFTGAGGVALSMYNT |
| | | | DESVRAFAAASMTMAYEKKWPLYLSTKNTILKKYDGRFKDIFQEVYEADWKSKFE |
| | | | AAGIWYEHRLIDDMVAYALKSEGGYVWACKNYDGDVQSDFLAQGFGSLGLMTSV |
| | | | LVCPDGKTIEAEAAHGTVTRHFRVHQKGGETSTNSIASIFAWTRGLAHRAKLDDN |
| | | | ARLLDFAQKLEAACVGTVESGKMTKDLALLVHGSSKVTRSDYLNTEEFIDAVAAEL |
| | | | QSRLAAN |
| 740 | 7 | Fra_e | YSVMIRVLQTAMAGALNLSSSYSAFKNPSLVSISNPKLFNGVLFKTRLCFSTRISNA |
| | | | SIRCFTSNAIDKVRVQNPIVEMDGDEMTRAIWKMIKDKLIFPYLELDVKYFDLGILN |
| | | | RDATDDKVTVESAEATLKYNVAIKCATITPDETRVKEFGLKAMWRSPNGTIRNILN |
| | | | GTVFREPILCSNIPRIVPGWNKPICIGRHAFGDQYRATDAIIKGPGKLKMVFVPENG |
| | | | EGPMELDVYDFKGPGVALAMYNVDQSIRAFAESSMAMAFAKKWPLYLSTKNTILK |
| | | | KYDGRFKDIFQEVYEEKWKEQFEEHSIWYEHRLIDDMVAYAVKSDGGYVWACKN |
| | | | YDGDVQSDLLAQGFGSLGMMTSVLLSGDGKTLEAEAAHGTVTRHYRLYQKGQET |
| | | | STNSIASIFAWTRGLEHRAKLDGNEKLLDFSHKLEAACIETVESGKMTKDL |
| 741 | 7 | Fra_e | NFFHREKRSRFSQMDLEKIKVDNPIVEMDGDEMTRVIWKSIKEKLILPFLELDIKYF |
| | | | DLGLPHREATNDKVTIESAEATLKYNVAIKCATITPDEARVKEFSLKHMWKSPNGT |
| | | | IRNILNGTVFREPIMCKNVPRLVPGWTKPICIGRHAFGDQYRATDLVIQGAGKLKM |
| | | | VFVPNSGDGSTELEVYNFTGSGGVALSMYNTDESIRAFAEASMNTAFQKRWPLYL |
| | | | STKNTILKKYDGRFKDIFQEVYEREWKSKFESAGIWYEHRLIDDMVAYALKSEGGY |
| | | | VWACKNYDGDVQSDFLAQGFGSLGLMTSVLVCPDGKTIEAEAAHGTVTRHYRVH |
| | | | EKGGETSTNSIASIFAWSRGLAHRAKLDNNARLLDYTKKLEAACIASVESGKMTK |
| | | | DLAILIHGPKVTRSRYLNTEEFIEAVAEELKARLPKKAKL |
| 742 | 7 | Fra_e | REKMAFEKIKVANPIVEMDGDEMTRVIWQFIKDKLILPFVELDIKYYDLGLPHRDAT |
| | | | DDKVTIESAEAALKYNVAIKCATITPDEARVKEFGLKQMWKSPNGTIRNILNGTVF |
| | | | REPILCKNVPRLVPGWTKPICIGRHAYGDQYRATDTVIKGAGKLKLVFVPEGKDEK |
| | | | TEIEVFNFTGEGGVALSMYNTDESIRSFAEASMNTAYQKKWPLYLSTKNTILKKYD |
| | | | GRFKDIFQEVYELNWKSKFEEAGIWYEHRLIDDMVAYALKSEGGYVWACKNYDG |
| | | | DVQSDFLAQGFGSLGLMSSVLVCPDGKTIEAEAAHGTVTRHYRVHQKGGETSTN |
| | | | SIASIFAWTRGLAHRAKLDDNAKLLDFTEKLEAACIGVVESGKMTKDLALIIHGSKL |
| | | | GRDKYLNTEEFIDSVANELKAKLSC |
| 743 | 7 | Lol_p | KWIKDKLIFPFLDLDIKYYDLGLPNRDATGDKVTIESAEATLKYNVAIKCATVTPDE |
| | | | GRVKEFNLKAMWRSPNGTIRNILNGTVFREPIICKNVPRLVPGWTKPICIGRHAFG |
| | | | DQYRATDVIIRGPGKLKLVFDGVEEQIELDVFNFNGAGGVALSMYNTDESIRAFAE |
| | | | SSMNVAYQKRWPLYLSTKNTILKKYDGRFKDIFQENYEKNWRGKFEKAGIWYEHR |
| | | | LIDDMVAYALKSEGGYVWACKNYDGDVQSDLIAQGFGSLGLMTSVLVCPDGRTV |
| | | | EAEAAHGTVTRHYRVHQKGGETSTNSIASIFAWSTGLAHRAKLDDNKRLLDFTQK |
| | | | LEAACVGTVESGKMTKDLALLIHGPTVSRDKYLNTVEFIDAVADELKTSLSVKSKL |
| 744 | 7 | Lol_p | LNALAKLVTPFSLLPVPPSPAPPAPFPISQASSSAVAAMAFEKIKVANPIVEMDGDE |
| | | | MTRVFWQSIKDKLIFPFLDLDIKYYDLGVLHRDATDDKVTVEAAEATLKYNVAIKC |
| | | | ATITPDEDRVKEFNLKQMWRSPNGTIRNIINGTVFREPIICKNVPKLVPGWTKPICI |
| | | | GRHAFGDQYRATDAVLKGPGKLRLVFEGKDETVDLEVFNFTGAGGVALAMYNTDE |
| | | | SIQGFAAASMAIAYEKKWPLYLSTKNTILKKYDGRFKDIFQAVYEADWKSKYEAAG |
| | | | IWYEHRLIDDMVAYALKSEGGYVWACKNYDGDVQSDFLAQGFGSLGLMTSVLMC |
| | | | PDGKTIEAEAAHGTVTRHFRVHQKGGETSTNSIASIFAWTRGLAHRAKLDDNARL |
| | | | HDFTLKLEEACVGTVESGKMTKDLALLVHGSSKVTRGDYLNTEEFIDAVAAELKSR |
| | | | LAAN |
| 745 | 7 | Ole_e | RRKMAFEKIKVANPIVEMDGDEMTRVIWQFIKDKLIFPFVELDIKYYDLGLPHRDAT |
| | | | DDKVTIESAEATLKYNVAIKCATITPDEARVKEFGLKQMWKSPNGTIRNILNGTVF |
| | | | REPILCKNVPRLVPGWTKPICIGRHAFGDQYRATDTVIKGPGKLKLVFVPEGKDEK |
| | | | TEIEVFNFTGEGGVALSMYNTDESIRSFAEASMNTAYQKKWPLYLSTKNTILKKYD |
| | | | GRFKDIFQEVYESNWKSKFEEAGIWYEHRLIDDMVAYALKSEGEYVWACKNYDG |
| | | | DVQSDFLAQGFGSLGLMTSVLVCPDGKTIEAEAAHGTVTRHYRVHQKGGETSTN |
| | | | STASIFAWTRGLAHRAKLDDNDKLLDFTEKLEAACIGVVESGKMTKDLALIIHGSK |
| | | | LGRDKYLNTEEFIDAVADELKAKLSC |
| 746 | 7 | Ole_e | KTELEVYNFTGAGGVAIAMYNTDESIRAFAEASMNTAYQKKWPLYLSTKNTILKKY |
| | | | DGRFKDIFQEVYEANWKSKYEAAGISYAVFC |
| 747 | 7 | Pla_l | LAILLHGPKVQRAQYLNTEEFIDAVAQELRDRLPKRAKL |
| 748 | 7 | Pla_l | LVSLTVTVTPLLELRFRFCFLKFANKKPFLTNSVFFCCLYISINSFTAEIPIPISLTISIH |
| | | | PSSTLFTLLVTTQHKQTKPNPMAFEKIKVANPIVEMDGDEMTRVIWTFIKDKLIFPF |
| | | | VELDIKYFDLGLPHRDATDDKVTVESAEATLKYNVAIKCATITPDEARVKEFGLKSM |
| | | | WRSPNGTIRNILNGTVFREPILCKNVPRLVPGWTKPICIGRHAFGDQYRATDAVIK |
| | | | GPGKLKMVFVPEGKDESTEFEVYNFTGEGGVALAMYNTDESIRSFADASMNVAFE |
| | | | KKWPLYLSTKNTILKKYDGRFKDIFQEVYEASWKSKFEEAGIWYEHRLIDDMVAYA |
| | | | LKSEGGYVWACKNYDGDVQSDFLAQGFGSLGLMTSVLVCPDGKTIEAEAAHGTV |
| | | | TRHFRVHQKGGETSTNSIASIFAWTRGLAHRAKLDDNAKLLEFTEKLEAACIGVVE |
| | | | AGKMTKDLALILHGPKLSRDTYLNTEEFLDAVAEELKAKLSC |
| 749 | 7 | Poa_p | RRPPHLPRLAAFPISEASIAAADAMAFEKIKVANPIVEMDGDEMTRVFWQSIKEKLI |
| | | | FPFLDLDIKYYDLGVLHRDATDDKVTVEAAEATLKYNVAIKCATITPDEDRVKEFNL |
| | | | KQMWRSPNGTIRNIINGTVFREPIICKNVPKLVPGWTKPICIGRHAFGDQYRATDA |
| | | | VLKGPGKLRLVFEGKDETVDLEVFNFTGAGGVALAMYNTDESIQGFAEASMAIAYE |
| | | | KKWPLYLSTKNTILKKYDGRFKDIFQAVYEADWKSKYEAAGIWYEHRLIDDMVAY |
| | | | ALKSEGGYVWACKNYDGDVQSDFLAQGFGSLGLMTSVLMCPDGKTIEAEAAHGT |
| | | | VTRHFRVHQKGGETSTNSIASIFAWTRGLAHRAKLDDNARLLDFTQKLEDACVGT |
| | | | VESGKMTKDLALLVHGSSKVTRGDYLNTEEFIDAVAAELQSRLAAN |
| 750 | 7 | Que_a | TAKQRLTIHQYKKSPQHLLISPSTIIARHQPLFVSLTHSRSLFKKMAFEKIKVANPIV |
| | | | EMDGDEMTRVFWKSIKDKLIFPFVDLDIKYFDLGLPYRDATDDKVTIESAEATLKY |
| | | | NVAIKCATITPDEARVKEFGLKQMWKSPNGTIRNILNGTVFREPIICKNVPRLVPG |
| | | | WTKPICIGRHAFGDQYRATDTVIKGAGKLKLVFVPEGKDEKTELEVYNFTGAGGVA |
| | | | IAMYNTDESIRAFAEASMNTAYQKKWPLYLSTKNTILKKYDGRFKDIFQEVYEANW |
| | | | KSKYEAAGIWYEHRLIDDMVAYAVKSEGGYVWACKNYDGDVQSDFLAQGFGSLG |
| | | | LMTSVLVCPDGKTIEAEAAHGTVTRHYRVHQKGGETSTNSIASIFAWSRGLSHRA |
| | | | KLDDNARLLDFTEKLEAACVGTVESGKMTKDLALLIHGSKVTREQYLSTEEFIDAV |
| | | | ATELKARLSA |
| 751 | 7 | Que_a | RTTALRLSAMSSGAKMLASTSSSSSSFLAVRNPSFSSTSTRLFNGGVLHRGNKNR |
| | | | VSFSSATRFANASLRCYASSAGFDRVQVQNPIVEMDGDEMTRIIWRMIKDKLIFPY |
| | | | LDLDIKYFDLGILNRDATDDRVTVESAEAALKYNVAVKCATITPDETRVKEFGLKS |
| | | | MWRSPNGTIRNILNGTVFREPILCRNIPKIIPGWKKPICIGRHAFGDQYRATDTVIE |
| | | | GPGKLKMVFVPDDGKTPVELDVFNFKGPGIALAMYNVDESIRAFAESSMTLAFAKK |
| | | | WPLYLSTKNTILKKYDGRFKDIFQEVYEEKWKQKFEENSIWYEHRLIDDMVAYVVK |
| | | | SEGGYVWACKNYDGDVLSDLLAQGFGSLGLMSSVLLSSDGKTLEAEAAHGTVTR |
| | | | HFRLHQKGQETSTNSIASIFAWTRGLEHRAKLDENEKLREFVHKLEAACIETVETG |
| | | | KMTKDLAILIHGSKVSREHYLNTEEFIDAVAQNLEAKIQEPVLA |
| 752 | 7 | Que_a | RTTALRLSAMSSGAKMLASTSSSSSSFLAVRNPSFSSTSTRLFNGGVLHRGNKNR |
| | | | VSFSSATRFANASLRCYASSAGFDRVQVQNPIVEMDGDEMTRIIWRMIKDKLIFPY |
| | | | LDLDIKYFDLGILNRDATDDRVTVESAEAALKYNVAVKCATITPDETRVKEFGLKS |
| | | | MWRSPNGTIRNILNGTVFREPILCRNIPKIIPGWKKPICIGRHAFGDQYRATDTVIE |
| | | | GPGKLKMVFVPDDGKTPVELDVFNFKGPGIALAMYNVDESIRAFAESSMTLAFAKK |
| | | | WPLYLSTKNTILKKYDGRFKDIFQEVYEEKWKQKFEENSIWYEHRLIDDMVAYVVK |
| | | | SEGGYVWACKNYDGDVLSDLLAQGFGSLGLMSSVLLSSDGKTLEAEAAHGTVTR |
| | | | HFRLHQKGQETSTNSIASIFAWTRGLEHRAKLDENEKLREFVHKLEAACIETVETG |
| | | | KMTKDLAILIHGSKVSREHYLNTEEFIDAVAQNLEAKIREPVLA |
| 753 | 7 | Que_a | GRHAFGDQYRATDIVIQESGKLKLVFVPNGHNEKKEFEVFNFTGAGGVALSMYNT |
| | | | DESIRAFAEASMNTAYQKKWPLYLSTKNTILKKYDGRFKDI |
| 754 | 7 | Que_a | GRFKDIFQEVYETQWKSKFEAAGIWYEHRLIDDMVAYAMKSEGGYVWACKNYDG |
| | | | DVQSDFLAQGFGSLGMMTSVLVCPDGKTIESEAAHGTVTRHYRVHQKGGETSTN |
| | | | SIASIFAWTRGLAHRAKLDSNARLLDFTEKLEAACVGTVESGKMTKDLALLIHGPK |
| | | | VTRSQYLNTEEFIDAVAEELRARLSTRAKL |
| 755 | 7 | Que_a | GDEMTRVFWKSIKDKLIFPFVDLDIKYFDLGLPYRDATDDKVTIESAEATLKYNVAI |
| | | | KCATITPDEARVKEFGLKQMWKSPNGTIRNILNGTVFREPIICKNVPRLVPGWTKPI |
| | | | CIGRHAFGDQYRATDTVIKGAGKLKLVFVPEGKDEKTELEVYNFTGAGGVAIAMYN |
| | | | TDESIRAFAEASMNTAYQKKWPLYLSTKNTILKKYDGRFKDIFQEVYEANWKSKYE |
| | | | AAGIWYEHRLIDDMVAYAVKSEGGYVWACKNYDGDVQSDFLAQGFGSLGLMTS |
| | | | VLVCPDGKTIEAEAAHGTVTRHYRVHQKGGETSTNSIASIFAWSRGLSHRAKLDD |
| | | | NARLLDFTEKLEAACVGTVESGKMTKDLALLIHGSKVTREQYLSTEEFIDAVATELK |
| | | | ARLSA |
| 756 | 8 | Amb_a | RGHNVFWDDPASQMAWVNKLSKEQLKEAMDKRVKSVVNKYKGQVIHWDVNNE |
| | | | NVHFNFFETKFGPDASTKIFQQVHQIDPDVILFLNDFNTLEQPGDTNATPDKYLKK |
| | | | FHEIRAGNPNAKMAIGLESHFDVPNIPHMRAVLDKMATAGVPIWLTEVDVAGTDP |
| | | | NQAHYLEQILREGYSHPAVQGIVMWASWTPKGCYRMCLTNNQFQNLPVGDTVDK |
| | | | LIKEWKTHASGTTAADGSFQTTLAHGDYKVTVTH |
| 757 | 8 | Amb_a | EVVAKERKKKVKITVECGGKPLPNAELSVQWVAKGFPLGNAMTKEILDMPEYEEW |
| | | | FTKRFKWATMENAMKWYSTEYNEGQEGFEVADKMLALAEKHNISVRGHNVFWD |
| | | | DQSHQMPWVEKLSVGKLKAAVAKHLKAVVSRYAGKVIHWDVVNENLHFSFFEDK |
| | | | LGKDASGEIFKEVAKLDSKPILFMNEFNTIEEPCDLAPLPTKYLAKLKQIQSYPGN |
| 758 | 8 | Amb_p | GYNERLSIGLEGHFQNVNIPYMRSAIDKVASSGLPIWITEVDVQTGPNQAMFFDQ |
| | | | VLREAHAHPSIHGIVVWSAWSPQGCYRMCLTDNNFNNLPTGDVVDRIIREFFSVE |
| | | | LTATTDVNGFYETSLIHGDYEVSFAH |
| 759 | 8 | Bet_v | VRIQAVDGQGNPISNTTVLLEQKKLSFPFGTAINKNILTNSDYQKWFTSRAFTVTV |
| | | | FENEMKWYANEPSQGEEEYDDADALLEFANQHGLDVRGHTV LWEDPQMIQGWV |
| | | | SSLSSSDLAEAVKKRINSIMSKYKGQVIAWDVVNENMHHSFFEDRLGGDASASFY |
| | | | NRAQKIDGSTTLFLNEYNTIEDNRDGSSNPHAYLQKLEEIQGFPGNSDLKMGIGLQ |
| | | | GHFSYPPDLSYVRASIDTLASTGLPIWITELDVKSSVGDEQTQAEYLEQILRELHAH |
| | | | PNVDGIMLWTAWLPSGCYRMCLTDNNFDNLATGDVVDKLMEEWGSKAFAGKTD |
| | | | ANGYFEASLFHGEYEVKISHPTEPSSDLSQSFVV |
| 760 | 8 | Cyn_d | FSFDEWDAHTRRSGDKTRRRTVRLVAKGADAKPMANANVSIELLRLGFPFGNTMT |
| | | | AEILSLPAYEKWFTSRFTHATFENEMKWYSTEWSQNQENYDVPDRMLKMAQKYG |
| | | | IKVRGHNVFWDDQNSQMRWVKPLNLDQLKSAMQKRLKNVVTRYAGKVIHWDVV |
| | | | NENLHFNFFESKLGSSASAQIYNQVGQIDRNAILFMNEFNVLEQPGDPNAVPSKYI |
| | | | AKMNQIRSYPGNSGLKMGVGLESHFSTPNIPYMRSTLDTLAKLKLPMWLTEVDVV |
| | | | KNPNQVKYLEQVLREGYAHPNVDGIIMWAAWHAKGCYVMCLTDNNFKNLPVGDL |
| | | | VDKLITEWKTHRTVATTDENGAVVLDLPLGEYKFTVHHPSLSGTTVDLMTVDGAS |
| | | | S |
| 761 | 8 | Que_a | IWVDSISLQPFTQEQWKSHQDQSIEKARKRKVRIHVVDEQGNPLPNASISIIQKK |
| | | | VSFPFGTAINKNILTNKAYQNWFSSRFTVTVFEDEMKWYTTEPSPGQEDYTAADAL |
| | | | FQFAKKHSIPVRGHNVLWDDPSKVQGWVSSLSPTDLAVAVKKRINSVMSRYKGQ |
| | | | VIAWDVVNENLHFSVFEDKLGSTASATFFNAAQEIDGTTTLFMNDYNIIEDSRDRS |
| | | | STPDKYIQKLKQIQRFPRNNNLKQGIGLESHFSIAPDLAYMRSSIDTLASTGLPVWI |
| | | | TELDIASALGQQVQARYLEQVLRELYAHPKINGIIMWSAWKPGGCYQMCLTDNSF |
| | | | NNLPTGNVVDKLLREWRSSLKGTADGDGFFEASLSHGDYELKISHPNVTSSSLAQ |
| | | | SQRFEVSSAD |
| 762 | 9 | Amb_a | PLEVQVYAEHAYQTTVARFSPNGEWVASADVSGMVRIWGTHNGFVLKNEFRVLS |
| | | | GRIDDLQWSGDGMRIVASGDGKGKSFVRAFMWDSGSNVGEFDGHSRRVLSCAF |
| | | | KPTRPFRIVTCGEDFLINFYEGPPFKFKLSHRDHSNFVNCVRFSPDGSKFITVSSDK |
| | | | QGLLYDGKTAEKKGELSSEDGHKGSIYAVSWSPDSKQVLTVSADKTAKIWTISED |
| | | | FNGTVAKTLCCPGSGGVEDMLVGCLWQNDYIVTVSLGGTIYLYSASDLDKDPTIL |
| | | | CGHMKNITSLVVLKTNPETILSSSYDGLISKWIRGVGYNGKLERKDKNQIKCLTAV |
| | | | DEEIISSGFDNKIWRIPLTGDECGDANIVDIGSQPIDLSVAIHKHELALISIEKGVVL |
| | | | LNGTQVLSTIDLGFTVSACAIAPDGTEAIVGGQDGKLHIYSVNGDSLTEEAVLEKH |
| | | | RGAITVIHYSPDVSMFASADANREAVVWDRVTREVKLKNMLYHTARINSLAWSPD |
| | | | NTMVATGSLDTCVIVYEISKPASSRITIKGANLGGVYAVSFVDDNTVVSSGEDACI |
| | | | RLWQISPQ |
| 763 | 9 | Amb_p | MANLVETYACIPSTERGRGILISGDPKTNAFLYCNGRSVIIRYLDRPLEVQVYAEHA |
| | | | YQTTVARFSPNGEWVASADVSGMVRIWGTHNGFVLKNEFRVLSGRIDDLQWSG |
| | | | DGMRIVASGDGKGKSFVRAFMWDSGSNVGEFDGHS |
| 764 | 9 | Amb_p | EFDGHSRRVLSCAFKPTRPFRIVTCGEDFLINFYEGPPFKFKLSHRDHSNFVNCVRF |
| | | | SPDGSKFITVSSDKQGLLYDGKTAEKKGELSSEDGHKGSIYAVSWSPDSKQVLTV |
| | | | SADKTAKIWTISEDFNGTVAKTLCCPGSGGVEDMLVGCLWQNDYIVTVSLGGTIY |
| | | | LYSASDLDKDPTILCGHMKNITSLVVLKTNPETILSSSYDGLISKWIRGVGYNGKLE |
| | | | RKDKNQIKCLTAVDEEIISSGFDNKIWRIPLTGDECGDANIVDIGSQPIDLSVAIHK |
| | | | HELALISIEKGVVLLNGTQVLSTIDLGFTVSACAIAPDGTEAIVGGQDGKLHIYSVN |
| | | | GDSLTEEAVLEKHRGAITVIHYSPDVSMFASADANREAVVWDRVTREVKLKNMLY |
| | | | HTARINSLAWSPDNTMVATGSLDTCVIVYEISKPASSRITIKGANLGGVYAVSFVD |
| | | | DNTVVSSGEDACIRLWQISPQ |
| 765 | 9 | Bet_v | MPQLAETYASVPTTERGRGILISGHPKSNTVLYTNGRSVIMINLDNPLDVSVYAEH |
| | | | AYPATVARYSPNGEWIASADVSGTVRIWGTRNEFVLKKEFKVLSGRIDDLQWSAD |
| | | | GQRIVACGDGKGKSLVRAFMWDSGTNVGEFDGHSRRVLSCAFKPTRPFRIVTCG |
| | | | EDFLVNFYEGPPFKFKQSHRDHSNFANCVRYSPDGNKFISVSSDKKGIIYDGKSG |
| | | | EKIGELSSEDGHKGSIYAVSWSPDGKQVFTASADKSAKVWEISEDGTGKVKKTLT |
| | | | SPVSGGVDDMLVGCLWQNDHLVTVSLGGTISLFSVTDLDKAPLLLSGHMKNVNS |
| | | | LAVLKSDPKVILSSSYDGLIIKWIQGIGYSGRLQRKENSQIKCFAAVEEEIVTSGFD |
| | | | NKIWRVSVHGDQCGDADSVDIGTQPKDLSLALLSPELALVSTDSGVVLLRGTKVL |
| | | | STINLGFSVTASAIAPDGSEAIVGGQDGKLHIYSITGDTLKEEAVLEKHRGAVSVIR |
| | | | YSPDVSMFASGDVNREAVVWDRVSREVKLKNMLYHTARINCLAWSPDSSIVATG |
| | | | SLDTCVIIYEVGKPASSRSTIKGAHLGGVYGLAFTDQYSVVSSGEDACVRVWRLTP |
| | | | E |
| 766 | 9 | Cyn_d | MAQLAETYACSPATERGRGILLAGDPKTDTIAYCTGRSVIIRRLDAPLDAWAYQDH |
| | | | AYPTTVARFSPNGEWVASADASGCVRVWGRYGDRALKAEFRPLSGRVDDLRWSP |
| | | | DGLRIVVSGDGKGKSFVRAFVWDSGSTVGEFDGHSKRVLSCDFKPTRPFRIVTCG |
| | | | EDFLANFYEGPPFKFKHSIRDHSNFVNCIRYSPDGSKFITVSSDKKGLIYDGKTGE |
| | | | KIGELSSEGSHTGSIYAVSWSPDSKQVLTVSADKTAKVWDIMEDATGKLNRTLVC |
| | | | TGIGGVDDMLVGCLWQNDHLVTVSLGGTFNVFSASNPDQEPVTFAGHLKTISSLV |
| | | | LFPQSNPRTILSTSYDGVIMRWIQGVGYGGRLMRKNNTQIKCFAAVEEELVTSGY |
| | | | DNKIFRIPLNGDQCGDAESVDVGGQPNAVNLAIQKPEFALVTTDSGIILLHNSKVI |
| | | | STTKVDYTITSSSVSPDGSEAVVGAQDGKLRIYSISGDTLTEEAVLEKHRGAITSIH |
| | | | YSPDVSMFASADANREAVVWDRATREVKLKNMLYHTARINCLAWSPDSRLVATG |
| | | | SLDTCAIVYEIDKPAASRITIKGAHLGGVRGLTFVDNDTLVTAGEDACIRDWKLVQ |
| | | | Q |
| 767 | 9 | Que_a | MSQLAETYACVPTTERGRGILISGNPKSNTITYTNGRSVIMINLDNPLDVSVYAEHA |
| | | | YPATVARYSPNGEWIASADVSGTVRIWGTRNEFVLKKEFKVLSGRIDDLQWSPDG |
| | | | MRIVACGDGKGKSLVRAFMWDSGTNVGEFDGHSRRVLSCAFKPTRPFRIVTCGE |
| | | | DFLVNFYEGPPFKFKLSHRDHSNFVNCVRFSPDGSKFISVSSDKKGLIYDAKTAEK |
| | | | MGELSSEDGHKGSIYAVSWSPDGKQVLTASADKSAKVWEISEDGNGKVKKTLAS |
| | | | PGSGGVDDMLVGCLWQNDHLVTVSLGGTISLFSATDLDKAPLLLSGHMKNVTSL |
| | | | AVLKSDPKMIWSTSYDGLIIKWIQGIGYSGRLQRKENSQIKCFAAVEEEIVTSGFD |
| | | | NKIWRISVHGDQCGDADSVDIGSQPKDLNLALLSPDLALVSTDSGVVLLRGAKIV |
| | | | STISLGFTVTASAISPDGTEAIVGGQDGKLHIYSVTGDTLNEEAVLEKHRGAISVIC |
| | | | YSPDVSMFASGDVNREAIVWDHDSREVKLKNMLYHTARINCLAWSPDSSMIATG |
| | | | SLDTCVIIYEVDKPASSRLTIKGAHLGGVYGLAFTDQYSVVSSGEDACVRVWKLTP |
| | | | Q |
| 768 | 10 | Amb_a | MANFTVNRVVTSPIEGQKPGTSGLRKKVKVFTQPHYLHNFVQSTFNALSAEKVKG |
| | | | STLVVSGDGRYYSKDAIQIIIKMAAANGVRRVWVGQNGLLSTPAVSAVVRERVGA |
| | | | DGSKANGAFILTASHNPGGPNEDFGIKYNMGNGGPAPEGITDKIFENTKTIKEYFI |
| | | | AEGLPDVDISAIGVSNFSGPGGQFDVDVFDSASDYVKLMKSIFDFQSIKKLITSPQ |
| | | | FSFCFDALHGVGGAYAKRMFVEELGAKESSLLNCVPKEDFGGGHPDPNLTYAKEL |
| | | | VARMGLGTNPDSNPPEFGAAADGDADRNMILGKRFFVTPSDSVAIIAANAVQAIP |
| | | | YFSSGLKGVARSMPTSAALDVVAKSLNLKFFEVPTGWKFFGNLMDAGLCSICGEE |
| | | | SFGTGSDHIREKDGIWAVLAWLSILAHKNKDNLDGGKLVTVEDIVKQHWATFGR |
| | | | HYYTRYDYENVDAGAAKEVMAHLVDLQSSISGVNTTI |
| 769 | 10 | Amb_a | AANAVEAIPYFSDGLKGVARSMPTSAALDVVAEALNLKFFEVPTGWKFFGNLMDA |
| | | | GLCSVCGEESFGTGSDHVREKDGIWAVLAWLSILAQKNKEKLNGEKLVTVEDIVR |
| | | | QHWATYG |
| 770 | 10 | Amb_p | SIFDFQSIKKLITSPQFSFCFDALHGVGGAYAKRMFVEELGAKESSLLNCVPKEDFG |
| | | | GGHPDPNLTYAKELVARMGLGTNPDSNPPEFGAAADGDADRNMILGKRFFVTPSD |
| | | | SVAIIAANAVQAIPYFSSGLKGVARSMPTSAALDVVAKSLNLKFFEVPTGWKFFGN |
| | | | LMDAGLCSICGEESFGTGSDHIREKDGIWAVLAWLSILAHKNKDNLDGGKLVTVE |
| | | | DIVKQHWATFGRHYYTRYDYENVDAGAAKEVMAHLVDLQSSISGVNTTIKGIRSD |
| | | | VADVVSADEFEYKDPVDGSVSKNQGIRYLFEDGSRLVFRLSGTGSEGATIRLYIEQ |
| | | | YEKDSSKTGRDSQEALAPLVDVALKLSKMLEYTGRSAPTVIT |
| 771 | 10 | Amb_p | GAFILTASHNPGGPNEDFGIKYNMGNGGPAPEGITDKIFENTKTIKEYFIAEGLPDV |
| | | | DISAIGVSNFSGPGGQFDVDVFDSASDYVKLMKSIFDFQ |
| 772 | 10 | Bet_v | MVVFKVARVESTPFDGQKPGTSGLRKKVKVFIQPNYLENFVQSTFNALTPEKVRGA |
| | | | TLVVSGDGRYYSKDAIQIIIKMAAANGVRRVWVGQNGLLSTPAVSAVIRERVAVD |
| | | | GSRASGAFILTASHNPGGPHEDFGIKYNMENGGPAPEGLTDKIYENTKTIKEYFIAE |
| | | | DLPDVDITTTGVTRFGGPEGQFDVDVFDSASDYVKLMKSIFDFELIRKLLSSPKFTF |
| | | | CYDALHGVAGAYAKRIFVEELGAQESSLLNCTPKEDFGGGHPDPNLTYAKELVAR |
| | | | MGLGKSNSQDEVPEFGAAADGDADRNMILGKRFFVTPSDSVAIIAANAVQAIPYF |
| | | | SAGLKGVARSMPTSAALDVVAKHLNLKFFEVPTGWKFFGNLMDAGLCSVCGEESF |
| | | | GTGSDHIREKDGIWAVLAWLSILAHKNKENLGGEKLVTVEDIVRQHWATYGRHY |
| | | | YTRYDYENVDAAAAKALMAYLVKLQSSLSEVNEIVKGVRSDVAKVVDADEFEYKD |
| | | | PVDGSISKHQGIRYLFEDGSRLVFRLSGTGSEGATIRLYIEQYEKDPSKIGRDSQE |
| | | | ALAPLVEVALKLSKMQEFTGRGAPTVIT |
| 773 | 10 | Cyn_d | MVLFTVTKKATTPFEGQKPGTSGLRKKVTVFQQPNYLQNFVQATFNALPADQVKG |
| | | | ATIVVSGDGRYFSKDAVQIITKMAAANGVRRVWVGQNSLMSTPAVSCVIRDRVG |
| | | | SDGSKATGAFILTASHNPGGPTEDFGIKYNMGNGGPAPESVTDKIFSNTKTISEYLI |
| | | | SEDLPDVDISVVGVTSFSGPEGPFDVDVFDSSVDYIKLMKSIFDFEATKNLVTSPKF |
| | | | TFCYDALHGVAGAYAKQIFVEELGADESSLLNCVPKEDFGGGHPDPNLTYAKELVE |
| | | | RMGLGKSTSNVEPPEFGAAADGDADRNMILGKRFFVTPSDSVAIIAANAVQSIPYF |
| | | | SSGLKGVARSMPTSAALDVVAKNLNLKFFEVPTGWKFFGNLMDAGMCSICGEESF |
| | | | GTGSDHIREKDGIWAVLAWLSILAFKNKDNLRGDKLVSVEDIVRQHWATYGRHY |
| | | | YTRYDYENVDAGAAKELMANLVSMQSSLSDVNKLIKEIRSDVSDVVAADEFEYKD |
| | | | PVDGSVSKHQGIRYLFGDGSRLVFRLSGTGSVGATIRVYIEQYEKDSSKIGRESQ |
| | | | DALAPLVDVALKLSKMQEYTGRSAPTVIT |
| 774 | 10 | Que_a | MVFKVSRVETKPIDGQKPGTSGLRKKVKVFIQPHYLHNFVQSTFNALTPEKVRGAT |
| | | | LVVSGDGRYYSKDAIQIITKMSAANGVRRVWVGQNGLLSTPAVSAVIRERVGVDG |
| | | | SRASGAFILTASHNPGGPNEDFGIKYNMENGGPAPEGITDKIYENTKTIKEYFISED |
| | | | LPDVDISAVGVTSFAGPEGQFDVEVFDSASDYVKLMKSIFDFESIRKLISSPKFTFC |
| | | | YDALHGVAGAYAKRIFVEELGAQESSLLNCTPKEDFGGGHPDPNLTYAKELVARM |
| | | | GLGKSSSQGEPPEFGAAADGDADRNMILGKRFFVTPSDSVAIIAANAVESIPYFSA |
| | | | GLKGVARSMPTSAALDVVAKHLNLKFFEVPTGWKFFGNLMDAGLCSVCGEESFGT |
| | | | GSDHIREKDGIWAVLAWLSILAHKNKENLGEEKLVSVEDIVRQHWTTYGRHYYTR |
| | | | YDYENVDAGAAKELMAYLVKLQSSLPEVNEIVKGTRSDVSKVINADEFEYKDPVD |
| | | | GSISKHQGIRYLFEDGSRLVFRLSGTGSEGATIRLYIEQYEKDPSKTGRDSQDALA |
| | | | PLVEVALKLSKMQEFTARTAPTVIT |
| 775 | 11 | Amb_a | QLQLLLKGASERGAKRIRVHVLTDGRDVVDGSSVGFAETLEKDLAELRGKGIDAQ |
| | | | VASGGGRMYVTMDRYENDWEVVKRGWDAQVLG |
| 776 | 11 | Amb_a | MGSTGFSWKLADHPKLPKGKLLAMIVLDGWGEASPDKFNCIHVADTPTMDSLKN |
| | | | GAPDKWRLVRAHGTAVGLPTEDDMGNSEVGHNALGAGRIYAQGAKLVDLALASG |
| | | | KIYEDEGFNYIKESFATNTLHLIGLMSDGGVHSRLDQLQLLLKGASQHGAKRIRVH |
| | | | VLTDGRDVLDGSSVGFAEILEAELSDLRSKGIDAQVASGGGRMYVTMDRYENDW |
| | | | EVVKRGWDAQVLGEAPHKFKNVVEAIKTLREAPGANDQYLPPFVIVDDSGKSVGP |
| | | | IVDGDAVVTFNFRADRMTMLAQALEYENFDKFDRVRVPKIRYAGMLQYDGELKLP |
| | | | SHYLVSPPLIERTSGEYLVHNGVRTFACSETVKFGHVTFFWNGNRSGYFNSELEEY |
| | | | VEIPSDSGITFNVQPKMKALEIGEKARDAILSGRFDQVRVNIPNGDMVGHTGDVE |
| | | | ATVVACKAADEAVKMIIDAVEQVGGIYVVTADHGNAEDMVKRNKKGEPILKDGEV |
| | | | QILTSHTLQPVPIAIGGPGLAAGVKFRKDV |
| 777 | 11 | Amb_p | EKFDKFDRVRFPKIRYAGMLQYDGELKLPSHYLVSPPLIERTSGEYLVHNGIRTFAC |
| | | | SETVKFGHVTFFWNGNRSGYFNKELEEYVEIPSDSGITFNVQPKMKALEIGEKARD |
| | | | AILSRKFDQVRVNIPNGDMVGHTGDIEATIVACKAADQAVKMILDAIEQVGGIYLV |
| | | | TADHGNAEDMVKRNKKGEPLLKDGEVQILTSHTLQPVPIAIGGPGLAAGVKFRKD |
| | | | VPSGGLANVAATVMNLHGFVAPDDYETTLIEVVD |
| 778 | 11 | Amb_p | DQLQLLLRGASQHGAKRIRVHVLTDGRDVLDGSSVGFAETLEAELSDLRSKGIDA |
| | | | QVASGGGRMYVTMDRYENDWEVVKRGWDAQVLGEAPHKFKNVVEAIKTLREAP |
| | | | GANDQYLPPFVIVDDSGKAVGPVVDGDAVVTFNFRADRMTMLAQALEYEKFDKFD |
| | | | RVRVPKIRYAGMLQYDGELKLPSHYLVSPPLIDRTSGEYLVNNGVRTFACSETVKF |
| | | | GHVTFFWNGNRSGYFNSELEEYVEIPSDSGITFNVQPKMKALEIGEKARDAILSGK |
| | | | FDQVRVNIPNGDMVGHTGDVEATVVACKAADEAVKMILDAVEQVGGIYVVTADH |
| | | | GNAEDMVKRNKKGEPLLKDGEVQILTSHTLQPVPIAIGGPGLAAGVKFRKDVPSG |
| | | | GLANVAATVMNLHGFVAPDDYETTLIEVVD |
| 779 | 11 | Bet_v | MGTSGFSWKLPEHPKLPKGKTVAVVVLDGWGEAKPDQYNCIHVAETPTMDSLKQ |
| | | | GAPEKWRLVRAHGKAVGLPTEDDMGNSEVGHNALGAGRIFAQGAKLVDSALASG |
| | | | KIYEGEGFKYIKECFENGILHLIGLLSDGGVHSRLDQLQLLLKGASERGAKRIRVHI |
| | | | LTDGRDVLDGSSVGFVETLENDLAKLREKGVDAQIASGGGRMYVTMDRYENDWE |
| | | | VIKRGWDAHVLGEAPYKFKSAVEAVKKLREELKVSDQYLPPFVIVDDNGKPVGPIV |
| | | | DGDAVVTINFRADRMVMIAKALEYENFDKIDRVRFPKIRYAGMLQYDGELKLPSHY |
| | | | LVEPPEIERTSGEYLVHNGVRTFACSETVKFGHVTFFWNGNRSGYFNSELEEYVEIP |
| | | | SDSGITFNVQPKMKALEIAEKTRDAILSGKFDQVRVNLPNGDMVGHTGDIEATVV |
| | | | ACKAADEAVKMILDAIEQVGGIYVVTADHGNAEDMVKRNKSGQPLLDKNGNLQV |
| | | | LTSHTLQPVPIAIGGPGLASGVRFRKDLPDGGLANVAATVINLHGFEAPSDYEPTLI |
| | | | ELVD |
| 780 | 11 | Cyn_d | SAMATAWTLPDHPKLPKGKTVAVVVLDGWGEANPDQYNCIHVAQTPVMDSLKNG |
| | | | APERWRLVKAHGTAVGLPSDDDMGNSEVGHNALGAGRIFAQGAKLVDSALASGK |
| | | | IYDGEGFNYIKESFENGTLHLIGLLSDGGVHSRLDQVQLLLKGASERGAKRIRVHIL |
| | | | TDGRDVLDGSSVGFVETLENDLSELREKGIDAQIASGGGRMNVTMDRYENDWGV |
| | | | VKRGWDAQVLGEAPHKFKSAVEAVKTLRAVPDANDQYLPPFVIVDESGKAVGPIV |
| | | | DGDAVVTFNFRADRMVMLAKALEYADFDKFDRVRVPKIRYAGMLQYDGELLLPKR |
| | | | YLVSPPEIDRTSGEYLVKNGVRTFACSETVKFGHVTFFWNGNRSGYFDESKEEYVE |
| | | | VPSDSGITFNVKPKMKAVEIAEKARDAILSGKFDQIRVNLPNGDMVGHTGDIEATV |
| | | | VACKAADEAVKIILDAVEQVGGIYLVTADHGNAEDMVKRNKAGKPLLDKSGAIQIL |
| | | | TSHTLQPVPVAIGGPGLHPGVKFRSDIETPGLANVAATVMNLHGFEAPADYEPTLIE |
| | | | VAD |
| 781 | 11 | Que_a | MGSSWKLADHPKLPKGKTVAVVVLDGWGEAKPDQYNCIHVAETPTMDSLKKGDP |
| | | | DKWRLVKAHGSAVGLPTEDDMGNSEVGHNALGAGRIFAQGAKLVDLALESGKIY |
| | | | DGEGFKYISECFEKGTLHLIGLLSDGGVHSRLDQLLLLLKGSSERGAKRIRVHILTD |
| | | | GRDVLDGSSVGFVETLENYLAELRGKGVDAQIASGGGRMYVTMDRYENDWEVVK |
| | | | RGWDAQVLGEAPFKFRNAVEGVKQLRQAPKASDQYLPPFVIADESGKPVGPIVDG |
| | | | DAVVTINFRADRMVMVAKAFEYEDFDKFDRVRVPKIRYAGMLQYDGELKLPSHYL |
| | | | VSPPEIDRTSGEYLVHNGIRTFACSETVKFGHVTFFWNGNRSGYFNEELEEYVEIPS |
| | | | DSGITFNVQPKMKALEIGEKVRDAILSGKFDQVRVNIPNGDMVGHTGDIEATVVA |
| | | | CKAADEAVKMILDAIEQVGGIYVVTADHGNAEDMVKRNKTGQPQLDKGGKIQILT |
| | | | SHTCQPVPIAIGGPGLAPGCRFRRDIPTGGLANVAATVMNLHGFEAPSDYEPTLVE |
| | | | VVD |
| 782 | 13 | Amb_a | MDEEYDVIVLGTGLKECILSGLLSVDGLKVLHMDRNDYYGGESTSLNLSQLWKRF |
| | | | KGGEAPPEELGASKDYNVDMVPKYMMANGTLVRVLIHTSVTKYLNFKAVDGSYVF |
| | | | NKGKVHKVPATDVEALKSPLMGLFEKRRARKFFIYIQDYDDNDPKSHEGMDVTKV |
| | | | PAKDLISKKYGLDDHTVDFIGHALALHRDDDYLEQPAIDLIKRVKLYAESLARFAG |
| | | | GSPYIYPLYGLGELPQAFARLSAVYGGTYMLNKPECKVEFEDGKVVGVTSEGETAK |
| | | | CKKVVCDPSYLPDKVQKVGKVARAICIMSHPIPNTNDAHSAQVILPQKQLGRKSD |
| | | | MYLFCCSYSHNVAPKGKFIAFVTTEAETDDPETELKPGIDLLGPVDQIFFDTYDRYE |
| | | | PVNQGEEDNCYISASYDATTHFESTVQDVIAMYSRITGKTLDLSVDLSAASAAGDE |
| 783 | 13 | Amb_p | MDEEYDVIVLGTGLKECILSGLLSVDGLKVLHMDRNDYYGGESTSLNLSQLWKRF |
| | | | KGGEAPPEELGASKDYNVDMVPKYMMANGTLVRVLIHTSVTKYLNFKAVDGSYVF |
| | | | NKGKVHKVPATDVEALKSPLMGLFEKRRARKFFIYIQDYDDNDPKSHEGMDVTKV |
| | | | PAKDLISKKYGLDDHTVDFIGHALALHRDDDYLEQPAIDLIKRVKLYAESLARFAG |
| | | | GSPYIYPLYGLGELPQAFARLSAVYGGTYMLNKPECKVEFEDGKVVGVTSEGETAK |
| | | | CKKVVCDPSYLPDKVQKVGKVARAICIMSHPIPNTNDAHSAQVILPQKQLGRKSD |
| | | | MYLFCCSYSHNVAPKGKFIAFVTTEAETDDPETELKPGIDLLGPVDQIFFDTYDRYE |
| | | | PVNQGEEDNCYISASYDATTHFESTVQDVIAMYSRITGKTLDLSVDLSAASAAGDE |
| 784 | 13 | Bet_v | MDEEYDVIVLGTGLKECILSGLLSVDGLKVLHMDRNDYYGGDSSSLNLTQLWKRF |
| | | | RGNDTPPEKLGSSREYNVDMIPKFMMANGKLVRVLIHTDVTKYLHFKAVDGSFVY |
| | | | NKGKIYKVPASDVEALTSSLMGLFEKRRARKFFLYVQDYEDNDPKSHEGLDLNKVT |
| | | | ARELITKYGLEDDTIGIIGHALALQIDDSYLDQPAMDFVKRMKLYAESLARFQGNS |
| | | | PYIYPLYGLGELPQAFARLSAVYGGTYMLNKPECKVEFGNDGKAFGVTSEGETAKC |
| | | | KKVVCDPSYLPDKVQKVGKVARAICIMSHPIPDTNDSHSVQVILPQKQLGRKSDM |
| | | | YLFCCSYAHNVAAKGKYIAFVSTEAETDKPEVELKAGIDLLGPVEEIFYDTYDRFVP |
| | | | TNKHEVDSCFISTSYDATSHFESTVDDVIQLYSKITGKALDLSVDL |
| 785 | 13 | Cyn_d | MDEEYDVIVLGTGLKECILSGLLSVDGLKVLHMDRNDYYGGESTSLNLTKLWKRF |
| | | | KGNDNPPEHLGISKQYNVDMIPKFMMANGALVRVLIHTSVTKYLNFKAVDGSFVY |
| | | | NNGKIHKVPATDVEALKSNLMGLFEKRRARKFFIYVQDYEEEDPKSHEGLDLHKVT |
| | | | TREVISKYGLEDDTVDFIGHALALHRDDNYLDEPAIHTVKRMKLYAESLARFQSAS |
| | | | PYIYPLYGLGELPQAFARLSAVYGGTYMLNKPECKVEFDENGKAYGVTSEGVTAKC |
| | | | KKVVCDPSYLPEKVKKVGKVARAICIMKHPIPHTKDSHSVQIILPKKQLKRKSDMY |
| | | | VFCCSYAHNVAPNGKFIAFVSTEAETDKPEIELKPGIDLLGPVEETFFDIYDRYEPTN |
| | | | NPEEDSCFLTNSYDATTHFETTVQDVLSMYNKITGKELDLSVDLNAASATEQE |
| 786 | 13 | Que_a | MDEEYDVVVLGTGLKECILSGLLSVDGLKVLHMDRNDYYGGESTSLNLIQLWKRF |
| | | | RGNDKPPAHLGSSRDYNVDMIPKFMMANGTLVRVLIHTDVTKYLYFKAVDGSFVY |
| | | | NKGKVHKVPATDMEALKSPLMGIFEKRRARKFFIYVQDYNETDPKTHDGMDLTRV |
| | | | TTRELIAKYGLDDNTVDFIGHALALHRDDRYLDEPALDTVKRMKLYAESLARFQGG |
| | | | SPYIYPLYGLGELPQAFARLSAVYGGTYMLNKPECKVEFNEVGQVLGVTSEGETAR |
| | | | CKKVVCDPSYLPNKVRKVGRVARAIAIMSHPIPNTNESHSVQVILPQKQLGRKSD |
| | | | MYLFCCSYSHNVAPKGKFIAFVSTEAETDHPETELKAGIDLLGPVDEIFFDIYDRYEP |
| | | | VNEPTLDNCFISTSYDATTHFESTVLDVLNMYTMITGKVLDLSVDLSAASAAE |
| 787 | 19 | Amb_a | MAKDPIRVLVTGAAGQIGYALVPMIARGIMLGPDQPVILHMLDIPPAAEALNGVKM |
| | | | ELVDAAFPLLKGVVATTDAVEACTGVNVAVMVGGFPRKEGMERKDVMSKNVSIYK |
| | | | SQASALEKYAAANCKVLVVANPANTNALILKEFAPSIPEKNITCLTRLDHNRALGQI |
| | | | SEKLNVQVSDVKNVIIWGNHSSTQYPDVTHATVTTPSGDKRVPELVNDDEWLKS |
| | | | GFIATVQQRGAAIIKARKLSSALSAASSACDHIRDWVCGTPAGTWVSMGVYSDG |
| | | | SYDVPAGLIYSFPVTCRNGEWTIVQGLSIDEFSRKKLDLTAEELSEEKALAYSCL |
| 788 | 19 | Amb_p | MAKDPIRVLVTGAAGQIGYALVPMIARGIMLGPDQPVILHMLDIPPAAEALNGVKM |
| | | | ELVDAAFPLLKGVVATTDAVEACTGVNVAVMVGGFPRKEGMERKDVMSKNVSIYK |
| | | | SQASALEKYAAANCKVLVVANPANTNALILKEFAPSIPEKNITCLTRLDHNRALGQI |
| | | | SEKLNVQVSDVKNVIIWGNHSSTQYPDVTHATVTTPSGDKRVPELVNDDEWLKS |
| | | | GFIATVQQRGAAIIKARKLSSALSAASSACDHIRDWVCGTPAGTWVSMGVYSDG |
| | | | SYDVPAGLIYSFPVTCRNGEWTIVQGLSIDEFSRKKLDLTAEELSEEKALAYSCL |
| 789 | 19 | Bet_v | MAKEPVRILVTGAAGQIGYALVPMIARGVVLGPDQPVILHMLDIPPAAEALNGVKM |
| | | | ELVDAAFPLLKGVIATTDVVEACTGVNIAIMVGGFPRKEGMERKDVMSKNVSIYKS |
| | | | QASALEKHAAANCKVLVVANPANTNALILKECAPSIPEKNISCLTRLDHNRALGQIS |
| | | | ERLNVPVCDVKNVIIWGNHSSTQYPDVSHATVKTPSGEKPVPELVADDAWLKGEF |
| | | | ITTVQQRGAAIIKARKLSSALSAASSACDHIRDWVLGTPEGTWVSMGVYSDGSYN |
| | | | VPAGLIYSFPVTCRNGEWKIVQGLSIDEFSRKKLDLTAEELSEEKTLAYSCL |
| 790 | 19 | Bet_v | MAKNPVRVLVTGAAGQIGYAIVPMVARGIMLGPDQPVILHLLDIEPAAEALNGVKM |
| | | | ELVDAAFPLLKGVVATTDVVEACKGVNVAVMVGGFPRKEGMERKDVMSKNVSIYK |
| | | | AQASALEEHAAEDCKVLVVANPANTNALILKEFAPSIPEKNISCLTRLDHNRALGQI |
| | | | SERLNVHVSDVKNVIIWGNHSSTQYPDVNHATVTTSGAEKPVRELVADDHWLNA |
| | | | EFITTVQQRGAAIIKARKLSSALSAASAACDHIRDWVLGTPKGTWVSMGVYSDGS |
| | | | YGIQPGLIYSFPVTCEKGQWSIVQGLKIDEFSRAKMDATAKELIEEKSLANSCL |
| 791 | 19 | Cyn_d | MAKEPMRVLVTGAAGQIGYALVPMIARGIMLGADQPVILHMLDIPPAAEALNGVK |
| | | | MELVDAAFPLLKGVVATTDVVEACTGVNVAVMVGGFPRKEGMERKDVMSKNVSI |
| | | | YKAQASALEAHAAPNCKVLVVANPANTNALILKEFAPSIPEKNITCLTRLDHNRALG |
| | | | QISERLNVQVSDVKNVIIWGNHSSTQYPDVNHATVKTPSGEKPVRELVADDEWL |
| | | | NGEFVKTVQQRGAAIIKARKLSSALSAASSACDHIRDWVLGTPEGTYVSMGVYSD |
| | | | GSYGVPAGLIYSYPVTCSGGEWKIVQGLPIDDLSRQKMDATAQELSEEKTLAYSCL |
| 792 | 19 | Que_a | MGKEPVRVLVTGAAGQIGYALVPMIARGVMLGPDQPVILHMLDIPPAAEALNGVK |
| | | | MELVDAAFPLLKGVVATTDVVEGCTGVNIAIMVGGFPRKEGMERKDVMSKNVSIY |
| | | | KSQASALEQHAAANCKVLVVANPANTNALILKEFAPSIPEKNITCLTRLDHNRALG |
| | | | QISERLNVQVSDVKNAIIWGNHSSTQYPDVNHATVKTPSGEKPVRELVADDAWL |
| | | | HGEFIATVQQRGAAIIKARKLSSALSAASSACDHIRDWVLGTPEGTWVSMGVYSD |
| | | | GSYNVPAGLIYSFPVTCRNGEWKIVQGLSIDELSRKKLDLTAEELTEEKALAYSCL |
| 793 | 20 | Amb_a | SQSRSFATAPPPPAVFVDKNTRVICQGITGKNGTFHTEQAIEYGTKMVGGVTPKK |
| | | | GGTEHLGLPVFNTVADAKAETKANASVIYVPPPFAAAAIMEALEAELDLIVCITEGIP |
| | | | QHDMVKVKAALLQQSKTRLIGPNCPGIIKPGECKIGIMPGYIHKPGRIGIVSRSGTL |
| | | | TYEAVYQTTVVGLGQSTCVGIGGDPFNGTNFVDCMEKFIADPQTEGIVLIGEIGGT |
| | | | AEEDAAALIKESGTEKPIVGFIAGLTAPPGRRMGHAGAIVSGGKGTAQDKIKTLKE |
| | | | AGVTVVESPAKIGSAMF |
| 794 | 20 | Amb_p | TRQYATASSQYAETIKNLRINGDTKVLFQGFTGKQGTFHAQQAIEYGTKVVGGTN |
| | | | PKKAGTEHLGLPVFKNVAEAMKETQASATAIFVPPPVAAASIEEAINAEVPLIVTITE |
| | | | GIPQHDMVRITDMLKTQSKSRMVGPNCPGIIAPGQCKIGIMPGFIHKRGRVGIVSR |
| | | | SGTLTYEAVNQTTQAGLGQSLVVGIGGDPFSGTNFIDCLNVFLKDEETDGIIMIGEI |
| | | | GGTAEEDAADFLKEYNTANKPVVSFIAGISAPPGRRMGHAGAIVSGGKGDANSKI |
| | | | TALEAAGVTVERSPAKLGSSLYDQFVKRDLI |
| 795 | 20 | Amb_p | CQTETKANASVIYVPPPFAAAAIMEALEAELDLIVCITEGIPQHDMVKVKAALLQQS |
| | | | KTRLIGPNCPGIIKPGECKIGIMPGYIHKPGRIGIVSRSGTLTYEAVYQTTVVGLGQ |
| | | | STCVGIGGDPFNGTNFVDCMEKFIADPQTEGIVLIGEIGGTAEEDAAALIKESGTEK |
| | | | PIVGFIAGLTAPPGRRMGHAGAIVSGGKGTAQDKIKTLKEAGVTVVESPAKIGSAM |
| | | | FEVFKQRGLV |
| 796 | 20 | Bet_v | AKLIGSIASRRASSIAAQTRQYGSAPHPSPAVFVDKNTRVICQGITGKNGTFHTEQ |
| | | | AIEYGTKMVGGVTPKKGGTEHLGLPVFNSVAEAKAETKANASVIYVPPPFAAAAIM |
| | | | EALEAELDLVVCITEGIPQHDMVRVKAAINTQSKTRLIGPNCPGIIKPGECKIGIMP |
| | | | GYIHKPGRVGIVSRSGTLTYEAVFQTTAVGLGQSTCVGIGGDPFNGTNFVDCIEKF |
| | | | IVDPQTEGIVLIGEIGGTAEEDAAALIKESGTQKPIVAFIAGLTAPPGRRMGHAGAI |
| | | | VSGGKGTAQDKIKTLREAGVTVVESPAKIGVAMLDVFKQRGLV |
| 797 | 20 | Cyn_d | AATRRASHLLGSTASRLLHARGFAAAAAAAPSPAVFVDKSTRVICQGITGKNGTFH |
| | | | TEQAIEYGTNMVGGVTPKKGGTEHLGLPVFNSVAEAKAETKANASVIYVPPPFAAA |
| | | | AIMEAMDAELDLVVCITEGIPQHDMVKVKAALNRQSKTRLIGPNCPGIIKPGECKI |
| | | | GIMPGYIHKPGRVGIVSRSGTLTYEAVFQTTAVGLGQSTCVGIGGDPFNGTNFVD |
| | | | CLEKFVNDPQTEGIVLIGEIGGTAEEDAAAFIQESKTEKPVVAFIAGLTAPPGRRMG |
| | | | HAGAIVSGGKGTAQDKIKALREAGVTVVESPAKIGSKMFEIFKERGMVE |
| 798 | 20 | Que_a | WTQTRQYAAAAAHPPPAVFVDKNTRVICQGITGKNGTFHTEQAIEYGTKMVGGVT |
| | | | PKKGGTEHLGLPVFNTVAEAKAETKANASVIYVPPPFAATAILEAMEAELDLVVCIT |
| | | | EGIPQHDMVRVKSALNRQSKTRLIGPNCPGIIKPGECKIGIMPGYIHKPGRVGIVS |
| | | | RSGTLTYEAVFQTTAVGLGQSTCVGIGGDPFNGTNFVDCIEKFLVDPQTEGIVLIG |
| | | | EIGGTAEEDAAALIKESGTEKPIVAFIAGLTAPPGRRMGHAGAIVSGGKGTAQDKI |
| | | | KTLREAGVTVVESPAKIGVTMHDVFKQKGLV |
| 799 | 22 | Amb_a | MALPNQQTVDYPSFKLVIVGDGGTGKTTFVKRHLTGEFEKKYEPTIGVEVHPLDFF |
| | | | TNCGKIRFYCWDTAGQEKFGGLRDGYYTHGQCAIIMFDVTARLTYKNVPTWH |
| 800 | 22 | Amb_a | QGSVPTFKLVLVGDGGTGKTTFVKRHLTGEFEKKYIATLGVEVHPLGFTTNLGPIQF |
| | | | DVWDTAGQEKFGGLRDGYYINGQCGIIMFDVTSRITYKNVPNWHRDLVRVCENIP |
| | | | IVLTGNKVDVKERKVKAKTITFHRKKNLQYYDISAKSNYNFEKPFLWLARKLVGNQ |
| | | | SLDFVAAPALAPPEVQVDQAVLDQYRQEMEAASALPLPDEDD |
| 801 | 22 | Amb_a | FDVTARLTYKNVPTWHRDLCRVCENIPIVLCGNKVDVKNRQVKAKQVTFHRKKNL |
| | | | QYYEISAKSNYNFEKPFLYLARKLAGDPNLHFVESPALAPPEVQIDMVAQQQHEAE |
| | | | LAVAANQPLPDDDDDAFE |
| 802 | 22 | Amb_p | QGSVPTFKLVLVGDGGTGKTTFVKRHLTGEFEKKYIATLGVEVHPLGFTTNLGPIQF |
| | | | DVWDTAGQEKFGGLRDGYYINGQCGIIMFDVTSRITYKNVPNWHRDLVRVCENIP |
| | | | IVLTGNKVDVKERKVKAKSITFHRKKNLQYYDISAKSNYNFEKPFLWLARKLVGNQ |
| | | | SLDFVAAPALAPPEVQVDQAVLDQYRQEMEAASALPLPDEDD |
| 803 | 22 | Amb_p | MALPNQQTVDYPSFKLVIVGDGGTGKTTFVKRHLTGEFEKKYEPTIGVEVHPLDFF |
| | | | TNCGKIRFYCWDTAGQEKFGGLRDGYYIHGQCAIIMFDVTARLTYKNVPTWHRDL |
| | | | CRVCENIPIVLCGNKVDVKNRQVKAKQVTFHRKKNLQYYEISAKSNYNFEKPF |
| 804 | 22 | Bet_v | MALPNQQTVDYPSFKLVIVGDGGTGKTTFVKRHLTGEFEKKYEPTIGVEVHPLDFF |
| | | | TNCGKIRFYCWDTAGQEKFGGLRDGYYIHGQCAIIMFDVTARLTYKNVPTWHRDL |
| | | | CRVCENIPIVLCGNKVDVRNRQVKAKQVTFHRKKNLQYYEISAKSNYNFEKPFLYL |
| | | | ARKLAGDPSLHFVESPALAPPEVQIDLAAQQQHEAELMAAASQPLPDDDDDTFE |
| 805 | 22 | Cyn_d | MALPNQQVVDYPSFKLVIVGDGGTGKTTFVKRHLTGEFEKKYEPTIGVEVHPLDFS |
| | | | TNCGKIRFYCWDTAGQEKFGGLRDGYYIHGQCAIIMFDVTSRLTYKNVPTWHRDL |
| | | | CRVCENIPIVLCGNKVDVKNRQVKAKQVTFHRKKNLQYYEISAKSNYNFEKPFLYL |
| | | | ARKLAGDQNLHFVEAVALKPPEVQIDMAMQQQHEAELVAAAAQ |
| 806 | 22 | Que_a | MALPNQQTVEYPSFKLVIVGDGGTGKTTFVKRHLTGEFEKKYEPTIGVEVHPLDFFT |
| | | | NCGKIRFYCWDTAGQEKFGGLRDGYYIHGQCAIIMFDVTARLTYKNVPTWHRDLC |
| | | | RVCENIPIVLCGNKVDVKNRQVKAKQVTFHRKKNLQYYEISAKSNYNFEKPFLYLA |
| | | | RKLAGDPALHFVESPALAPPEVQIDLAAQQQHEAELQQAASQPLPDDDDDTFE |
| 807 | 22 | Que_a | MALPNQQTVEYPSFKLVIVGDGGTGKTTFVKRHLTGEFEKKYEPTIGVEVHPLDFFT |
| | | | NCGKIRFYCWDTAGQEKFGGLRDGYYIHGQCAIIMFDVTARLTYKNVPTWHRDLC |
| | | | RVCENIPIVLCGNKVDVKNRQVKAKQVTFHRKKNLQYYEISAKSNYNFEKPFLYLA |
| | | | RKLAGDANLHFVESPALAPPEVQIDLAAQQQHEAELQQAASQPLPDDDDDTFE |
| 808 | 24 | Amb_a | MATKKSVSSLTEADLKGKRVFVRVDLNVPLDDTFKITDDTRIRAAVPTIKYLMSNG |
| | | | ARVILSSHLGRPKGVTPKFSLKPLVPRLSELLGIEVKMADDCVGPEVEKLVAEIPEG |
| | | | GVLLLENVRFYKEEEKNDPEFAKKLASLADLYVNDAFGTAHRAHASTEGVAKHLKP |
| | | | AVAGFLMQKELDYLVGAVSNPKKPFAAIVGGSKVSSKIGVIESLLEKVNILVLGGG |
| | | | MIFTFYKAQGLAVGSSLVEEDKLDLATTLLEKAKSKGVSLLLPSDVVIADKFAADAN |
| | | | SKVVPASSIPDGWMGLDIGPDSIKSFNEALDTTKTVIWNGPMGVFEFDKFAVGTE |
| | | | AIAKKLAELSGKGVTTIIGGGDSVAAVEKVGLADKMSHISTGGGASLELLEGKPLP |
| | | | GVLALDDA |
| 809 | 24 | Amb_p | SLTEADLKGKRVFVRVDLNVPLDDTFKITDDTRIRAAVPTIKYLMSNGARVILSSHL |
| | | | GRPKGVTPKFSLKPLVPRLSELLGIEVKMADDCVGPEVEKLVAEIPEGGVLLLENVR |
| | | | FYKEEEKNDPEFAKKLASLADLYVNDAFGTAHRAHASTEGVAKHLKPAVAGFLMQ |
| | | | KELDYLVGAVSNPKKPFAAIVGGSKVSSKIGVIESLLEKVNILVLGGGMIFTFYKAQ |
| | | | GLAVGSSLVEEDKLDLATTLLEKAKSKGVSLLLPSDVVIADKFAADANSKVVPASSI |
| | | | PDGWMGLDIGPDSIKSFNESLDTTKTVIWNGPMGVFEFDKFAVGTEAIAKKLAEL |
| | | | SGKGVTTIIGGGDSVAAVEKVGLADKMSHISTGGGASLELLEGKPLPGVLALDDA |
| 810 | 24 | Bet_v | MATKRSVSTLKEADLKGKRVFVRVDLNVPLDDNFNITDDTRIRAAVPTIKYLQAHG |
| | | | AKVILSSHLGRPKGVTPKYSLKPLVPRLSELLGTEVKMANDCVGEEVEKLVAEIPEG |
| | | | GVLLLENVRFHKEEEKNDPEFAKKLASLADLYVNDAFGTAHRAHASTEGVAKYLKP |
| | | | SVAGFLMQKELDYLVGAIANPKRPFAAIVGGSKVSSKIGVIESLLAKVDLLLLGGG |
| | | | MIFTFYKAQGYSVGSSLVEEDKLDLARSLIEKAKSKGVSLLLPTDVIIADKFAPDAN |
| | | | SKVVPASGIPDGWMGLDIGPDSVKTFNKALDTTKTIIWNGPMGVFEFEKFAAGTE |
| | | | AIAKKLAELSDKGVTTIIGGGDSVAAVEKVGLAEKMSHISTGGGASLELLEGKPLP |
| | | | GVLALDDA |
| 811 | 24 | Cyn_d | MATKRSVGTLGEADLKGKKVFVRADLNVPLDDAQKITDDTRIRASVPTIKFLLEKG |
| | | | AKVILASHLGRPKGVTPKYSLKPLVPRLSELLGIDVVMANDCIGEEVEKLAAALPEG |
| | | | GVLLLENVRFYKEEEKNDPEFAKKLASVADLYVNDAFGTAHRAHASTEGVTKYLKP |
| | | | AVAGFLMQKELDYLVGAVANPKKPFAAIVGGSKVSTKIGVIESLLAKVDILILGGG |
| | | | MIYTFYKAQGYAVGKSLVEEDKLDLATSLIEKAKAKGVSLLLPTDIVVADKFAADAE |
| | | | SKIVPATSIPDDWMGLDVGPDATKTFNEALDTTQTIIWNGPMGVFEFDKFAAGTE |
| | | | ATAKKLAELTSTKGVTTIIGGGDSVAAVEKAGLADKMSHISTGGGASLELLEGKPL |
| | | | PGVLALDEA |
| 812 | 24 | Que_a | MATKRSVSTLKQADLKGKRVFVRVDLNVPLDDNFNITDDTRIRAAVPTIKYLQSHG |
| | | | ARVILSTHLGRPKGVTPKYSLKPIVPRLSELLGVEVKMANDCIGEEVEKLVAETPEG |
| | | | GVLLLENVRFHKEEEKNDPEFSKKLASLADLYVNDAFGTAHRAHASTEGVAKFLKP |
| | | | AVAGFLMQKELDYLVGAVSNPKRPFAAIVGGSKVSSKIGVIESLLGKVNLLLLGGG |
| | | | MIFTFYKAQGYSVGSSLVEEDKLDLATTLIEKAKAKGVSLLLPTDVVIADKFAADAN |
| | | | SKVVPASAIPDGWMGLDIGPDSIKTFNEALDTTQTVIWNGPMGVFEFEKFAAGTE |
| | | | ATAKKLADLSAKGVTTIIGGGDSVAAVEKVGLADKMSHISTGGGASLELLEGKPLP |
| | | | GVLALDDA |
| 813 | 27 | Amb_a | GVFTDKDKAAAHLKGGAKKVVISAPSANAPMFVMGVNEKEYTPDITIVSNASCTT |
| | | | NCLAPLAKVIHDKFGIVEGLMTTVHSITATQKTVDGPSMKDWRGGRAASFNIIPSS |
| | | | TGAAKAVGKVLPALNGKLTGMAFRVPTVDVSVVDLTVRLEKKATYEQVKAAIKEES |
| | | | EGKLKGILGYVDEDVVSTDFVGDSRSSIFDAKAGIALNDNFLKLVSWYDNEWGY |
| 814 | 27 | Amb_a | MSCYKGKYADELIANAAYIGTPGKGILAADESTGTIGKRLSSINVENSESNRRALR |
| | | | ELLFCTPGALQYISGIILFEETLYQKTAAGKPFVELMKEANVLPGIKVDKGVVELAGT |
| | | | NGETTTTGLDGLAQRCAQYYEAGARFAKWRAVLKIGANEPSQLAINENANGLARY |
| | | | AIICQENGLVPIVEPEILVDGSHDINKCADVTERVLAACYKALNDHHVLLEGTLLKP |
| | | | NMVTPGSDSKKVAPEVVGEYTVRALQRTMPAAVPAVVFLSGGQSEEEATVNLNAI |
| | | | NQYKGKKPWSLTFSYGRALQQSTLKAWGGKEENVKKAQETFLIRCKANSEASLG |
| | | | KYEGGAAGEGANESLHVKDYKY |
| 815 | 27 | Amb_p | MSCYKGKYADELIANAAYIGTPGKGILAADESTGTIGKRLSSINVENSESNRRALR |
| | | | ELLFCTPGALQYISGIILFEETLYQKTAAGKPFVELMKEANVLPGIKVDKGVVELAGT |
| | | | NGETTTTGLDGLAQRCAQYYEAGARFAKWRAVLKIGANEPSQLAINENANGLARY |
| | | | AIICQENGLVPIVEPEILVDGSHDINKCADVTERVLAACYKALNDHHVLLEGTLLKP |
| | | | NMVTPGSDSKKVAPEVVGEYTVRALQRTMPAAVPAVVFLSGGQSEEEATVNLNAI |
| | | | NQYKGKKPWSLTFSYGRALQQSTLKAWGGKEENVKKAQETFLIRCKANSEASLG |
| | | | KYEGGAAGEGANESLHVKDYKY |
| 816 | 27 | Bet_v | MSAFKGKYHDELIANAAYIGTPGKGILAADESTGTIGKRLSSINVENVEENRRALR |
| | | | ELLFTAPNALQYLSGVILFEETLYQKTASGQLFAELLKENGVLPGIKVDKGTVVLAG |
| | | | TNGETTTQGLDGLAQRCQKYYEAGARFAKWRAVLNIGPNEPSQLSINENANGLAR |
| | | | YAIICQENGLVPIVEPEILVDGSHSIEKCADVTERVLAACYKALNDHHVLLEGTLLKP |
| | | | NMVTPGSDAPKVAPEVVAEHTVRALLRTVPAAVPAVVFLSGGQSEEEATINLNAM |
| | | | NKLKGKKPWTLSFSFGRALQSSTLKAWGGKLENVAKAQAALLARAKANSEATLGI |
| | | | YKGDAQLGEGASESLHVKGYKY |
| 817 | 27 | Cyn_d | MSAHVGKFADELIKNAAYIGTPGKGILAADESTGTIGKRFSSINVENIEENRRALRE |
| | | | LLFCAPGALQYLSGVILFEETLYQKTKDGKPFVDVLKEGGVLPGIKVDKGTIEVAGT |
| | | | DKETTTQGHDDLGKRCAKYYEAGARFAKWRAVLKIGPNEPSQLAIDLNAQGLARY |
| | | | AIICQENGLVPIVEPEILVDGPHDIERCAYVTEMVLAACYKALSEHHVLLEGTLLKPN |
| | | | MVTPGSDAKKVAPEVIAEYTVRALQRTVPAAVPAIVFLSGGQSEEEATLNLNAMNK |
| | | | LNTKKPWSLSFSFGRALQASTLKAWAGKEENVEKARAALLARCKANSEATLGTYK |
| | | | GDAAAGEGVSESLHVKDYKY |
| 818 | 27 | Que_a | MSAYQGKYADELCANAAYIGTPGKGILAADESTGTIGKRLSSINVENVEENRRALR |
| | | | ELLFTTPGALQYLSGVILFEETLYQKTHDGKPFVNLLKENGVLPGIKVDKGTVELAG |
| | | | TNGETTTQGLDGLAQRCQKYYEAGARFAKWRAVLKIGPTEPSQLAINENANGLAR |
| | | | YAIICQENGLVPIVEPEILVDGPHDILKCADVTERVLAAVYKALNDHHVLLEGTLLKP |
| | | | NMVTPGSEAPKVAPEVIAEHTVRALQRTMPAAVPAVVFLSGGQSEEQATVNLNAM |
| | | | NKYKGKKPWTLSFSFGRALQQSTLKAWGGKKENVQKAQAAFLARAKANSEATLG |
| | | | TYKGDATLGEGASESLHVKDYKY |
| 819 | 28 | Amb_p | AKKVIISAPSKDAPMFVVGVNAHEYTPDLDIVSNASCTTNCLAPLAKVINDRFGIVE |
| | | | GLMTTVHAMTATQKTVDGPSMKDWRGGRAASFNIIPSSTGAAKAVGKVLPALNG |
| | | | KLTGMAFRVPTVDVSVVDLTVRIEKAATYEQVKAAIKEESEGKLKGILGYVDEDVV |
| | | | STDFVGDSRSSIFDAKAGIALNDNFLKLVSWYDNEWGYSSRVIDLICHIASVK |
| 820 | 29 | Amb_a | MAEKSFKYVIIGGGVSAGYAAREFAKQGVQPGELAIISKEAVAPYERPALSKAYLFP |
| | | | EGAARLPGFHVCVGSGGEKLLPEWYTEKGIELILNTEIVKADLASKSLTSAAGDTY |
| | | | KYKILITATGSTVLKLTDFKVEGADAKNILYLREIDDADKLVEAIKAKKNGKAVVVG |
| | | | GGYIGLELSAVLKINNFDVKMVYPEPWCMPRLFTADIAAFYEGYYEKKGVGIIKGTV |
| | | | ASGFTKNDNGEVKEVKLKDGRVLEADIVVVGVGARPLTNLFKGQVEEDKGGIKTD |
| | | | AFFKTSVPDVYAVGDVATFPMKMYGDIRRVEHVDHSRKSAEQAVKAIFASEQGKD |
| | | | IEAYDYLPYFYSRSFDLSWQFYGDNVGDAVIFGDHDPASAKAKFGSYWIKDGKVV |
| | | | GAFLEGGAPEENQAIAKVAKTQPAASSLDVLAKEGLGFASKI |
| 821 | 29 | Amb_p | MGKVKIGINGFGRIGRLVARVALLSDDIELVAVNDPFISTEYMTYMFKYDSVHGPW |
| | | | KKHEIQVKDSNTLLFGDKPVTVFGMKNPEETPWGEAGAEYVVESTGVFTDKDKAA |
| | | | AHLKGGAKKVVISAPSANAPMFVMGVNEKEYTPDITIVSNASCTTNCLAPLAKVIH |
| | | | DKFGIVEGLMTTVHSITATQKTVDGPSMKDWRGGRAASFNIIPSSTGAAKAVGKV |
| | | | LPALNGKLTGMAFRVPTVDVSVVDLTVRLEKKATYEQVKAAIKEESEGKLKGILGY |
| | | | VDEDVVSTDFVGDSRSSIFDAKAGIALNDNFLKLVSWYDNEWGYSSRVIDLICHI |
| | | | ASVQ |
| 822 | 29 | Amb_p | MAEKSFKYVIIGGGVSAGYAAREFAKQGVQPGELAIISKEAVAPYERPALSKAYLFP |
| | | | EGAARLPGFHVCVGSGGEKLLPEWYTEKGIELILNTEIVKADLASKSLTSAAGDTY |
| | | | KYKILITATGSTVLKLTDFKVEGADAKNILYLREIDDADKLVEAIKAKKNGKAVVVG |
| | | | GGYIGLELSAVLKINNFDVKMVYPEPWCMPRLFTADIAAFYEGYYEKKGVGIIKGTV |
| | | | ASGFTKNDNGEVKEVKLKDGRVLEADIVVVGVGARPLTNLFKGQVEEDKGGIKTD |
| | | | AFFKASVPDVYAVGDVATFPMKMYGDIRRVEHVDHSRKSAEQAVKAIFASEQGKD |
| | | | IEAYDYLPYFYSRSFDLSWQFYGDNVGDAVIFGDHDPASAKAKFGSYWIKDGKVV |
| | | | GAFLEGGAPEENQAIAKVAKTQPAASSLDVLAKEGLGFASKI |
| 823 | 29 | Bet_v | MAEKSFKYVIVGGGVAAGYAAKEFAKQGLKPGELAIVSKEAVAPYERPALSKAYLF |
| | | | PESPARLPGFHVCVGSGGERLLPEWYKEKGIELILRTEIVKADLAAKILTSAAGETF |
| | | | KYQILITATGSSVIRLTDFGVQGADAKNIFYLREIDDADKLIEAFKAKKNGKAVVVG |
| | | | GGYIGLELGAVLKMNNYDVSMVYPEPWCMPRLFTSGIAAFYEGYYKNKGIEIIKGT |
| | | | VAVGFTSDSKGEVKEVKLKDGRVLEADIVVVGVGGRPLTTLFKGQVEEEKGGIKT |
| | | | DASFKTSVTGVYAVGDVATFPLKLYNELRRVEHVDHARKSAEQAVKAIKASEEGK |
| | | | TIEEYDYLPYFYSRSFDLSWQFYGDNVGDSVLFGDNNPASPKPKFGSYWIKDGKV |
| | | | VGAFLEGGNPEENKAIAKVARVQPPVENLDLLTKEGLSFAAKI |
| 824 | 29 | Cyn_d | MAKHFKYVILGGGVAAGYAAREFGKQGVKPGELAIISKEPVAPYERPALSKGYLFP |
| | | | QNAARLPGFHTCVGSGGERLLPEWYSEKGIELILSTEIVKVDLASKTLTSASEATFT |
| | | | YEILLIATGSSVIKLTDFGVQGAEYNNILYLRDIQDGEKLVAAMQAKKDGKAVVVG |
| | | | GGYIGLELSAALKMNNFDVTMVYPEPWCMPRLFTAGIAHFYEGYYASKGINLVKGT |
| | | | YAAGFDADSNGDVTAVKLKDGRVLEADIVIVGVGGRPLTGLFKGQVAEEKGGIKT |
| | | | DGFFETSVPDVYAIGDVATFPMKLYNDQRRVEHVDHARKSAEQAVRAIKAKESGE |
| | | | SIAEYDYLPYFYSRSFDVAWQFYGDNVGDDVLFGDNDPAAAKPKFGSYWVKDGK |
| | | | VVGVFLEGGSADEYQAIARVARAQPQVADVEALRKDGLDFAIKT |
| 825 | 29 | Que_a | MAAKSFKYVIVGGGVSAGYAAREFAKQGVKPGELAIISKEAVAPYERPALSKAYLFP |
| | | | ESPARLPGFHVCVGSGGERLLPEWYKEKGIELILSTEIVKADLAAKTLISAAGETFN |
| | | | YQILITATGSSVIRLTDFGVQGADAKNIYYLREVDDADKLVEAIKAKKNGKVVIVGG |
| | | | GYIGLELSAVMKINNLDVNMVYPEPWCMPRLFTADIAAFYEGFYKNKGIQIIKGTV |
| | | | AVGFTADSNGEVKEVKLKDGRVLEADIVVVGVGGRPLTTLFKGQVEEEKGGIKTD |
| | | | SFFKTSVPNVYAVGDVATFPLKLYKELRRVEHVDHSRKSAEQAVKAIKASEEGKTI |
| | | | EEYDYLPFFYSRSFDLSWQFYGDNVGDTVIFGDNNPETPKPKFGSYWIKDGKVLG |
| | | | AFLEGGTPEENKAIAKVARVQPPVENLDVLSKEGLSFACKI |
| 826 | 30 | Amb_a | AQGSQLVTPWNMSISSGHALLRDPRLNKGLAFTEREREVHYLTGLLPPTIATQELQ |
| | | | EKKAMQIIRQYEVPLQKYIAMIGLQERNERLFYKLLTDHVEELLPVVYTPTVGEACQ |
| | | | KFGSIFQRPQGLYISLKDKGKVLQVLRNWPERNIEVIVVTDGERILGLGDLGCQGM |
| | | | GIPVGKLSLYTALGGVRPSACLPITIDVGTNNEKLLNDEFYIGLKQNRSRGEEYDEL |
| | | | LEEFMKAVKINYGEKILIQFEDFANHNAFSLLNRYRTTHLVFNDDIQGTASVVLSGL |
| | | | LSALNLLGGTLSDHTFLFLGAGEAGTGIAELIALQISKKTDTSIEEARKKIWLVDSK |
| | | | GLVESSRTESLQHFKLPWAHEHEPVSNLLDAVEDIKPSVLIGTSGVGRQFTQEVIE |
| | | | AMSSINEKPLIMALSNPTSQAECTAEEAYTWSKGKAIFASGSPFDPVTYEDQVFVP |
| | | | GQANNAYIFPGFGLGLIMCGATRVHDDLLLAASEGLASQVTDEDYAKGIIFPPFSCI |
| | | | RKISAHIAAQVADKAYELGLASLLPRPNDLVQYAESCMYSPIYPNYR |
| 827 | 30 | Amb_p | AQGSQLVTPWNMSISSGHALLRDPRLNKGLAFTEREREVHYLTGLLPPTIATQELQ |
| | | | EKKAMQIIRQYEVPLQKYIAMIGLQERNERLFYKLLTDHVEELLPVVYTPTVGEACQ |
| | | | KFGSIFQRPQGLYISLKDKGKVLQVLRNWPERNIEVIVVTDGERILGLGDLGCQGM |
| | | | GIPVGKLSLYTALGGVRPSACLPITIDVGTNNEKLLNDEFYIGLKQNRSRGEEYDEL |
| | | | LEEFMTAVKINYGEKILIQFEDFANHNAFSLLNRYRTTHLVFNDDIQGTASVVLSGL |
| | | | LSALNLLGGTLSDHTFLFLGAGEAGTGIAELIALQISKKTDTSIEEARKKIWLVDSK |
| | | | GLVESSRTESLQHFKLPWAHEHEPVSNLLDAVEDIKPSVLIGTSGVGRQFTQEVIE |
| | | | AMSSINEKPLIMALSNPTSQAECTAEEAYTWSKGKAIFASGSPFDPVTYEDQVFVP |
| | | | GQANNAYIFPGFGLGLIMCGATRVHDDLLLAASEGLASQVTDEDYAKGIIFPPFSCI |
| | | | RKISAHIAAQVADKAYELGLASLLPRPNDLVQYAESCMYSPIYPNYR |
| 828 | 30 | Bet_v | MGKIKIGINGFGRIGRLVARVALQRDDVELVAVNDPFITTDYMTYMFKYDTVHGP |
| | | | WKHHELKVQDSKTLLFGDKPVTVFGIRNPEEIPWAEAGADFVVESTGVFTDKDKA |
| | | | AAHLKGGAKKVIISAPSKDAPMFVVGVNEKEYKPELNIVSNASCTTNCLAPLAKVI |
| | | | NDRFGIVEGLMTTVHSITATQKTVDGPSMKDWRGGRAASFNIIPSSTGAAKAVGK |
| | | | VLPALNGKLTGMAFRVPTVDVSVVDLTVRLEKKASYEEIKAAIKEESEGKLKGILGY |
| | | | TEEDVVSTDFVGDNRSSIFDAKAGIALNDNFVKLVAWYDNEWGYSSRVVDLIRHI |
| | | | ASVQ |
| 829 | 30 | Bet_v | GGGVQDVYGEDTATEDHFVTPWSVSVASGYSLLRDPHHNKGLAFTERERDAHFL |
| | | | RGLLPPTVASQELQVKKMMHNIRQYQVPLQKYMAMMDLQERNEKLFYKLLIDNVE |
| | | | ELLPIVYTPTVGEACQKYGSIFMRPQGLFISLKEKGKILEVLRNWPEKNIQVIVVTD |
| | | | GERILGLGDLGCQGMGIPVGKLSLYTALGGVRPSACLPITIDVGTNNEQLLNDEFYI |
| | | | GLRQRRATGQEYAELLHEFMTAVKQIYGEKVLIQFEDFANHNAFDLLAKYGTTHLV |
| | | | FNDDIQGTASVVLAGLVAAQKLVGGTLADHRYLFLGAGEAGTGIAELIALEISKQT |
| | | | NAPLEETRKKVFLVDSKGLIVSSRKESLQHFKKPWAHEHEPVKELVDAVKVIKPTV |
| | | | LIGTSGVGNKFTKEVVEAMASINERPIILALSNPTSQSECTAEEAYRWSQGRAIFAS |
| | | | GSPFAPVEYEGKVFVPGQANNAYIFPGFGLGLLMSGAIRVHDDMLLAASEALAAQV |
| | | | TQEDFDKGLIFPPFTNIRKISAQIAAKVAAKAYELGLATRLPQPIDLVKCAESCMYSP |
| | | | AYRSYR |
| 830 | 30 | Cyn_d | MAGGGVEDAYGEDRATEEQLVTPWAFSVASGYTLLRDPRHNKGLAFSEAERDAH |
| | | | YLRGLLPPAFASQELQEKKLMHNLRQYTVPLQRYIAMMDLQERNERLFYKLLIDNV |
| | | | EELLPVVYTPTVGEACQKYGSIYRRPQGLYISLKDKGKILEVLKNWPERSIQVIVVT |
| | | | DGERILGLGDLGCQGMGIPVGKLSLYTALGGVRPSACLPITIDVGTNNETLLNDEF |
| | | | YIGLRQRRATGEEYHELLEEFMTAVKQNYGEKVLIQFEDFANHNAFDLLAKYSKSH |
| | | | LVFNDDIQGTASVVLAGLLASLKVVGGSLADHTYLFLGAGEAGTGIADLIALEMSK |
| | | | HNEMPIDECRKKIWLVDSKGLIVESRKESLQHFKKPWAHEHEPLKTLLEAVESIKP |
| | | | TVLIGTSGVGRTFTKEVIEAMASFNEKPVIFSLSNPTSHSECTAEEAYTWTQGRAV |
| | | | FASGSPFDPVEYEGKVYVPGQSNNAYIFPGFGLGVVISGAIRVHDDMLLAASEALA |
| | | | EQVTEEHFGKGLIFPSFTNIRGISARIAAKVAAKAYELGLASHLPRPDDLVKYAESC |
| | | | MYTPAYRSYR |
| 831 | 30 | Que_a | AGGVRDVYGEDSATEDQFVTPWSVSVASGYSLLRDPHHNKGLAFTIRERDAHFLR |
| | | | GLLPPTVASQDLQVKKMMHNIRQYQVPLQKYMAMMDLQERNQRLFYKLLIDNVEE |
| | | | LLPIVYTPTVGEACQKYGSIFMRPQGLFISLKEKGKILEVLRNWPEKNIQVIVVTDG |
| | | | ERILGLGDLGCQGMGIPVGKLSLYTALGGIRPSACLPITIDVGTNNEKLLNDEFYIG |
| | | | LKQKRATGQEYAELLDEFMMAVKQNYGEKVLIQFEDFANHNAFDLLAKYGTTHLVF |
| | | | NDDIQGTASVVLAGLVAGQKLVGGTLADHRFLFLGAGEAGTGIAELIALEMSKQTK |
| | | | APLEETRKKIWLVDSKGLIVSSRKESLQQFKKPWAHEHEPIKELVDAVKAIRPTVLI |
| | | | GTSGVGRTFTKEVVEAMASINEKPIILALSNPTSQSECTAEEAYTWSQGRAIFASG |
| | | | SPFPPVEYDGKVFMPGQANNAYVFPGLGLGLIMSGAIRVHDDMLLAASEALAAQV |
| | | | SQENFDRGLLYPPFTNIRKISAHIAANVAAKAYELGLATRLPEPKDLVKYAESCMYS |
| | | | PAYRNYR |
| 832 | 32 | Que_a | MGKIKIGINGFGRIGRLVARVALERDDVELVAVNDPFITTDYMTYMFKYDTVHGQ |
| | | | WKHHELKVKDSKTLLFGDRPVATFGIRNPEEIPWGEAGAEFVVESTGVFTDKEKA |
| | | | AAHLKAGAKKVIISAPSKDAPMFVVGVNENDYKPELDIVSNASCTTNCLAPLAKVI |
| | | | HDRFGIVEGLMTTVHSITATQKTVDGPSMKDWRGGRAASFNIIPSSTGAAKAVGK |
| | | | VLPSLNGKLTGMAFRVPTVNVSVVDLTVRLEKKASYEEIKAAIKEESEGKLKGILGY |
| | | | TQEDVVSSDFVGDSRSSIFDAKAGIALNDNFVKLVSWYDNEWGYSSRVIDLIRHI |
| | | | ASVQ |
| 833 | 32 | Cyn_d | MAKIKIGINGFGRIGRLVARVALQSDDVELVAVNDPFITTDYMTYMFKYDTVHGQ |
| | | | WKHHDVKVKDSKTLLFGEKEVTVFGCRNPEETPWGEAGAEYVVESTGVFTDKDK |
| | | | AAAHLKGGAKKVVISAPSKDAPMFVCGVNEKEYKSDIHIVSNASCTTNCLAPLAKV |
| | | | INDKFGIVEGLMTTVHAITATQKTVDGPSAKDWRGGRAASFNIIPSSTGAAKAVG |
| | | | KVLPALNGKLTGMAFRVPTVDVSVVDLTVRLEKSATYDEIKAAIKAESEGDLKGILG |
| | | | YVEEDLVSTDFQGDNRSSIFDAKAGIALNDKFVKLVSWYDNEWGYSSRVIDLIRH |
| | | | MHST |
| 834 | 34 | Amb_a | SSGQVIRCKAAVAREAGKPLVIEEVEVAPPQKMEVRLKIHFTSLCHTDVYFWEAKG |
| | | | QHPLFPRILGHEAGGIVESVGEGVTELKPGDKVLPIFTGECGECRHCKSEESNMCD |
| | | | LLRINTDRGVMINDGKTRFSKDGQPIYHFLGTSTFSEYTVVHSGCVAKINPDAPLD |
| | | | KVCVLSCGISTGMGATLNVAKPKKGMSVAIFGLGAVGLAAAEGARIAG |
| 835 | 34 | Amb_a | WEAKGQNPVFPRILGHEAGGVVESVGEGVTDLQPGDHVLPVFTGECKECAHCKS |
| | | | EESNMCDLLRINTDR |
| 836 | 34 | Amb_p | TTTGQVIRCKAAVAWEAGKPLVMEEVEVAPPQKHEVRIKILFTSLCHTDVYFWEAK |
| | | | GQNPVFPRILGHEAGGVVESVGEGVTDLQPGDHVLPVFTGECKECAHCKSEESN |
| | | | MCDLLRINTDRGVMLHDQKSRFSINGKPIFHFVGTSTFSEYTVVHVGCLAKINPDA |
| | | | PLDKVCVLSCGISTGLGATLNVAKPKKGSSVAVFGLGAVGLAAAEGARIAGASRII |
| | | | GVDLNANRFELAKKFGVTEFVNPKDYKKPVQEVIAELTNGGVDRSVECTGHIDAMI |
| | | | SAFECVHDGWGVAVLVGVPHKDAVFKTNPMNLLNERTLKGTFFGNYKPRSDIPSV |
| | | | VEKYMNKELELEKFITHEVPFSEINKAFDLMLKGEGLRCIIRMD |
| 837 | 34 | Amb_p | GKPLVIEEVEVAPPQKMEVRLKIHFTSLCHTDVYFWEAKGQHPLFPRILGHEAGGI |
| | | | VESVGEGVTELKPGDKVLPIFTGECGECRHCKSEESNMCDLLRINTDRGVMINDG |
| | | | KTRFSKDGQPIYHFLGTSTFSEYTVVHSGCVAKINPDAPLDKVCVLSCGISTGMGA |
| | | | TLNVAKPKKGMSVAIFGLGAVGLAAAEGARIAGASRIIGIDLNPSRAKEAMKFGVT |
| | | | EFVNPKDHDKPIHEVIAAMTDGGVDRSVECTGNVKAMISAFECVHD |
| 838 | 34 | Amb_p | CVHDGWGVAVLVGVPNKDDEFKTLPINFLNERTLKGTFFGNYKPRTDIPGVVEKY |
| | | | MNKELEVEKFITHTIGFSEINKAFDYMLKGESLRCIIRMDA |
| 839 | 34 | Amb_p | SMSTTTGQVIRCKAAVAWEAGKPLVMEEVEVAPPQKHEVRIKILFTSLCHTDVYF |
| | | | WEAKGQNPVFPRILGHEAGGVVESVGEGVTDLQPGDHVLPVFTGECKECAHCKS |
| | | | EESNMCDLLRINTDRGVMLHDQKSRFSINGKPIFHFVGTSTFSEYTVVHVGCLAKI |
| | | | NPDAPLDKVCVLSCGISTGLGATLNVAKPKKGSSVAVFGLGAVGLAAAEGARIAG |
| | | | ASRIIGVDLNANRFELAKKFGVTEFVNPKDYKKPVQEVIAELTNGGVDRSVECTGH |
| | | | IDAMISAFECVHDGWGVAVLVGVPHKDAVFKTNPMNLLNERTLKGTFFGNYKPRS |
| | | | DIPSVVEKYMNKELELEKFITHEVPFSEINKAFDLMLKGEGLRCIIRMDA |
| 840 | 34 | Ant_o | SSVAIWVLFPSEIVISVPVDSRGERAMATAGKVIKCKAAVAWEAGKPLSIEEVEVA |
| | | | PPQAMEVRVKILFTSLCHTDVYFWEAKGQTPVFPRIFGHEAGGIVESVGEGVTDVA |
| | | | PGDHVLPVFTGECKECPHCKSAESNMCDLLRINTDRGVMISDGKSRFSIDGKPIY |
| | | | HFVGTSTFSEYTVMHVGCVAKINPEAPLDKVCVLSCGISTGLGASINVAKPPKGST |
| | | | VAIFGLGAVGLAAAEGARIAGASRIIGIDLNANRFEEARKFGCTEFVNPKDHSKPV |
| | | | QEVLIEMTNGGVDRSVECTGNVNAMIQAFECVHDGWGVAVLVGVPHKDAEFKTH |
| | | | PMKFLNERTLKGTFFGNFKPRTDLPNVVEMYMKKELEVEKFITHSVPFSEINKAFDL |
| | | | MARGEGIRCIIRMEN |
| 841 | 34 | Ant_o | HTDVYFWEAKGQTPVFPRILGHEAGGIVESVGEGVTELVPGDHVLPVFTGECKEC |
| | | | AHCKSEESNLCDLLRINVDRGVMIGDGQSRFTIDGKPIFHFVGTSTFSEYTVIHVG |
| | | | CLAKINPEAPLDKVCVLSCGISTGLGATLNVAKPKKDSTVAIFGLGAVGLAAMEGA |
| | | | KMAGASRIIGVDLNPAKYEQAKKFGCTDFVNPKDHTKPVQEVLVEMTNGGVDRA |
| | | | VECTGHIDAMIAAFECVHDGWGVAVLVGVPHKEAVFKTHPMNFLNERTLKGTFFG |
| | | | NYKPRTDLPEVVEMYMRKELDVEKFITHSVPFSQINTAFDLMLKGEGLRCVMRMG |
| | | | E |
| 842 | 34 | Bet_v | MATQGQVITCKAAVAWEPNKPLVIEDVQVAPPQAGEVRIKILFTALCHTDAYTWS |
| | | | GKDPEGLFPCILGHEAAGIVESVGEGVTEVQPGDHVIPCYQAECQECKFCKSGKT |
| | | | NLCGKVRSATGVGVMLSDRKSRFSVNGKPIYHFMGTSTFSQYTVVHDVSVAKIDP |
| | | | KAPLEKVCLLGCGVPTGLGAVWNTAKVEPGSIVAVFGLGTVGLAVAEGAKAAGAS |
| | | | RIIGIDIDSKKYDVAKNFGVTEFVNPKDHEKPIQQVLVDLTDGGVDYSFECIGNVS |
| | | | VMRAALECCHKGWGTSVIVGVAASGQEISTRPFQLVTGRVWKGTAFGGFKSRSQ |
| | | | VPWLVEKYLKKEIKVDEYITHNLTLEEINKAFDLMHEGGCLRCVL |
| 843 | 34 | Bet_v | TAGQVIKCKAAVAWEAGKPLVIEEVEVAPPQANEVRVKILFTSLCHTDVYFWEAKG |
| | | | QTPLFPRIFGHEAGGIVESVGEGVTDLKPGDHVLPVFTGECKECRHCKSEESNMC |
| | | | DLLRINTDRGVMLSDGKTRFSIKGQPIYHFVGTSTFSEYTVVHVGCLAKINPKAPL |
| | | | DKVCILSCGISTGLGATLNVAKPKKGQSVAVFGLGAVGLAAAEGARIAGASRIIGV |
| | | | DLNPDRFEEAKKFGVTEFVNPKDHNKPVQEVIAELTDGGVDRAVECTGSIQAMIS |
| | | | AFECVHDGWGVAVLVGVPSKDDAFKTHPMNLLNERTLKGTFFGNYKPRTDIPGVV |
| | | | EKYMNKELELEKFITHTVPFSEINKAFDYMLHGKSIRCIISMD |
| 844 | 34 | Bet_v | LTIYITAERDTDTDLSQSKQRSPSSSSSEIAMSSTAGQVIKCKAAVAWEAGKPLVI |
| | | | EEVEVAPPQANEVRVKILFTSLCHTDVYFWEAKGQTPLFPRIFGHEAGGIVESVGE |
| | | | GVTDLKPGDHVLPVFTGECKECRHCKSEESNMCDLLRINTDRGVMLSDGKTRFSI |
| | | | KGQPIYHFVGTSTFSEYTVVHVGCLAKINPKAPLDKVCILSCGISTGLGATLNVAKP |
| | | | KKGQSVAVFGLGAVGLAAAEGARIAGASRIIGVDLNPDRFEEAKKFGVTEFVNPKD |
| | | | HNKPVQEVIAELTDGGVDRAVECTGSIQAMISAFECVHDGWGVAVLVGVPSKDD |
| | | | AFKTHPMNLLNERTLKGTFFGNYKPRTDIPGVVEKYMNKELELEKFITHTVPFSEIN |
| | | | KAFDYMLHGKSIRCIISMDA |
| 845 | 34 | Cyn_d | SLEERLVDLGFLLEKQMATTGKVIKCKAAVAWEAGKPLSMEEVEVAPPQAMEVRIK |
| | | | ILFTSLCHTDVYFWEAKGQNPVFPRIFGHEAGGIVESVGEGVTDVAPGDHVLPVFT |
| | | | GECKECAHCKSAESNMCDLLRINTDRGVMIGDGKSRFSINGKPIYHFVGTSTFSE |
| | | | YTVMHVGCVAKINPEAPLDKVCVLSCGISTGLGASINVAKPPKGSTVAVFGLGAVG |
| | | | LAAAEGARIAGASRIIGVDLNPNRFEEARKFGCTEFVNPKDHKKPVQEVLAEMTNG |
| | | | GVDRSVECTGNINAMIQAFECVHDGWGVAVLVGVPHKDAEFKTHPMNFLNERTL |
| | | | KGTFFGNFKPRTDLPNVVELYMKKELEVEKFITHTVPFSEINKAFDLMAKGEGIRCII |
| | | | RMDH |
| 846 | 34 | Cyn_d | MATTGKVIKCKAAVAWEAGKPLSMEEVEVAPPQAMEVRIKILFTSLCHTDVYFWE |
| | | | AKGQNPVFPRIFGHEAGGIVESVGEGVTDVAPGDHVLPVFTGECKECAHCKSAES |
| | | | NMCDLLRINTDRGVMIGDGKSRFSINGKPIYHFVGTSTFSEYTVMHVGCVAKINPE |
| | | | APLDKVCVLSCGISTGLGASINVAKPPKGSTVAVFGLGAVGLAAAEGARIAGASRII |
| | | | GVDLNPNRFEEARKFGCTEFVNPKDHKKPVQEVLAEMTNGGVDRSVECTGNINA |
| | | | MIQAFECVHDGWGVAVLVGVPHKDAEFKTHPMNFLNERTLKGTFFGNFKPRTDLP |
| | | | NVVELYMKKELEVEKFITHTVPFSEINKAFDLMAKGEGIRCIIRMDH |
| 847 | 34 | Fra_e | LSMSNTAGLVIPCKAAVSWEAGKPLVIQQVEVAPPQAMEVRVQIKYTSLCHTDLYF |
| | | | WEAKGQTPLFPRIFGHEAAGIIESVGEGVSDLQVGDHVLPVFTGECGDCAHCKSQ |
| | | | ESNMCDLLRINTDRGVMLSDGNSRFSINGNPINHFLGTSTFSEYTVVHSGCLAKV |
| | | | NPLAPLDKICILSCGISTGLGATLNVAKPKKGSSVAIFGLGAVGLAAAEGARIAGAS |
| | | | RIIGIDLNPNRFDEAKKFGVTEFVNPKEHDRPVQQVIAEMTNGGVDRSVECTGNV |
| | | | NVMVSAFECVHDGWGVAVLVGVPNKDAVFMTKPINLLNERTLKGTFFGNYKPRTD |
| | | | LPSVVDMYMNKKLELDKFITHRLSFSEINKAFEYMVKGEGLRCIISMEDE |
| 848 | 34 | Fra_e | TLSKRKGTKMSSTAGQVIRCKAAVSWEAGKPLVIEEVDVAPPQKMEVRLKILFTSL |
| | | | CHTDVYFWEAKEQTPLFPRIFGHEAGGIVESVGEGVADLQPGDHVLPMFTGECKE |
| | | | CRHCKSTESNMCDLLRINTDRGVMINDGKTRFSKNGQPIYHFLGTSTFSEYTVVH |
| | | | VGCVAKINPAAPLEKVCVLSCGISTGLGATLNVARPTKGSTVAIFGLGAVGLAAAE |
| | | | GARISGASRIIGIDLNPNRFKDAKKFGVTEFVNPKDHDRPVQQVLVEMTDGGVDR |
| | | | SVECTGNVDAMISAFECVHDGWGVAVLVGVPNKDDTFKTRPVNLLNERTLKGTFF |
| | | | GNYKPRSDIPSVVEKYMNKELELDKFITHQVRFSEINKAFDLMLRGESLRCIINMEA |
| 849 | 34 | Fra_e | IPPTGFSISHQTSYIQITQFTEIKKQISDMSSTVGQVIKCKAAVAWEAGKPLVIEEV |
| | | | EVAPPQKMEVRLKILFTSLCHTDVYFWEAKAQDSVFPRIFGHEAAGIVESVGEGVT |
| | | | ELTPGDHVLPVFTGECKECAHCKSEESNMCSLLRINTDRGVMINDGQTRFSINGK |
| | | | PIYHFVGTSTFSEYTVVHVGCVAKINPLAPLDKVCVLSCGISTGLGATLNVAKPKKG |
| | | | SSVAIFGLGAVGLGAAEGARLAGASRIIGVDLNSGRFEEAKKFGVTEFVNPKDHKK |
| | | | PVQEVIAEMTDGGVDRSVECTGNVNAMISAFECVHDGWGVAVLVGVPHKDAEFK |
| | | | THPMNLLNERTLKGTFFGNYKPRSDLPSVVELYMNNELELEKFITHEVPFNEINKAF |
| | | | ELMLKGEGLRCIIRM |
| 850 | 34 | Lol_p | HTDVYFWEAKGQTPVFPRILGHEAGGIVESVGEGVTELVPGDHVLPVFTGECKEC |
| | | | AHCKSEESNLCDLLRINVDRGVMIGDGQSRFTINGKPIFHFVGTSTFSEYTVIHVG |
| | | | CLAKINPEAPLDKVCVLSCGISTGLGATLNVAKPKKGSTVAIFGLGAVGLAAMEGA |
| | | | KMAGASRIIGVDLNPAKYEQAKKFGCTDFVNPKDHTKPVQEVLVEMTNGGVDSA |
| | | | VECTGNINAMISAFECVHDGWGVAVLVGVPHKEAVFKTHPMNFLNERTLKGTFFG |
| | | | NYKPRTDLPEVVEMYM |
| 851 | 34 | Lol_p | GEGAMATAGKVIKCKAAVAWEAGKPLSIEEVEVAPPQAMEVRVKILFTALCHTDVY |
| | | | FWEAKGQTPVFPRIFGHEAGGIVESVGEGVTELAPGDHVLPVFTGECKECPHCKS |
| | | | AESNMCDLLRINTDRGVMLSDGKSRFSIDGKPIYHFVGTSTFSEYTVLHVGCVAKI |
| | | | NPEAPLDKVCVLSCGISTGLGASINVAKPPKGSTVAIFGLGAVGLAAAEGARIAGA |
| | | | SRIIGIDLNANRFEEARKFGCTEFVNPKDHNKPVQEVLIEMTNGGVDRSVECTGNI |
| | | | NAMIQAFECVHDGWGVAVLVGVPHKDAEFKTHPMNFLNERTLKGTFFGNFKPRT |
| | | | DLPNVVEMYMKKELEVEKFITHSVPFSEINKAFDLMAKGEGIRCIIRMEN |
| 852 | 34 | Ole_e | TFLHFRGKSSMSNTAGLVIPCKAAVSWEAGKPLVIQQVEVAPPQAMEVRVKIKYTS |
| | | | LCRTDLYFWEAKGQTPLFPRIFGHEAAGIIESVGEGVSDLQVGDHVLPVFTGECGD |
| | | | CAHCKSEESNMCDLLRINTDRGFMLSDGKSRFSINGNPINHFLGTSTFSEYTVVHS |
| | | | GCLAKVNPLAPLDKICVLSCGISTGLGATLNVAKPKKGSSVAIFGLGAVGLAAAEG |
| | | | ARIAGASRIIGIDRNPSRFDEAKKFGVTEFVNPKEHNRPVQQVIAEMTNGGVDRSV |
| | | | ECTGNINAMVSAFECVHDGWGVAVLVGVPNKDAVFMTKPINLLNERTLKGTFFGN |
| | | | YKPRTDLPSIVDMYMNKKLELDKFITHHLSFSEINKAFEYMVKGEGLRCIISMED |
| 853 | 34 | Ole_e | KKQISEMSSTVGQVIKCKAAVAWEAGKPLVIEEVEVAPPQKMEVRLKVLFTSLCHT |
| | | | DVYFWEAKAQNSAFPRIFGHEAAGIVESVGEGVTELAPGDHVLPVFTGECKECAH |
| | | | CKSEESNMCSLLRINTDRGVMINDGQTRFSINGKPIYHFVGTSTFSEYTVVHIGCV |
| | | | AKINPLAPLDKVCILSCGISTGLGATLNVAKPTKGSSVAIFGLGAVGLGAAEGARLA |
| | | | GASRIIGVDLNPSRFEEAKKFGVTEFVNPKDHKKPVQEVIAEMTDGGVDRSVECT |
| | | | GNVNAMISAFECVHDGWGVAVLVGVPHKDAEFKTHPMNLLNERTLKGTFFGNYK |
| | | | PRSDLPSVVEMYMNKELELEKFITHEVPFHEINKAFELMLKGEGLRCIIRME |
| 854 | 34 | Ole_e | FLFTFIDSMATKGQAITCKAAVAWEPNKPLVIEEVQVAPPQAGEVRIKILFTALCHT |
| | | | DAYTWSGKDPEGLFPCILGHEAAGVVESVGEGVIELQPGDHVIPCYQAECKECKF |
| | | | CKSGKTNLCGKVRVATGAGVMLSDRNSRFSINGKPIYHFMGTSTFSQYTVVHDVS |
| | | | VAKIDPKAPLEKVCLLGCGIPTGLGAVWNTAKVEQGSIVAVFGLGTVGLAVAEGAK |
| | | | AAGASRIIGIDIDSKKFDTAKKFGVTEFINPKDYDKPIQQVIVDLTDGGVDYSFECI |
| | | | GNVSVMRSALECCHKGWGTSVIVGVAASGQEISTRPFQLVTSRVWKGTAFGGFK |
| | | | SRSQVPWLVDKYMKKEIKVDEYISHNLTLAEINKAFDLMHDGVCLRVVLNMHA |
| 855 | 34 | Pla_l | ESVGEGVTELAPGDHVLPVFTGECGDCAHCKSQESNMCNLLRINVERGVMINDG |
| | | | KSRFSINGKPVYHFVGTSTFSEYTVVHVGCLAKINPAAPLDKVCVLSCGISTGLGAT |
| | | | LNVAKPKKGQSVAIFGLGAVGLGAAEGARLAGASRIIGVDLNSSRFEEAKKFGVTE |
| | | | FVNPKDYKKPVQEVIAEMTDGGVDRSVECTGNINAMISAFECVHDGWGVAVLVG |
| | | | VPHKDAEFKTHPMNVLNERTLKGTFFGNYKPRSDLPSVVEMYMNKELELEKFITHE |
| | | | VPFAEINKAFDLMLKGEGLRCIIKME |
| 856 | 34 | Pla_l | FPNQIYNSLNLNFQAAEGARVSGASRIIGIDLNPARFEQAKKFGVTECLNPKDHKK |
| | | | PIQEVIVEMTDGGVDRSVECTGNVTAMISAFECVHDGWGVAVLVGVPNKEDAFK |
| | | | TNPVNLLNERTLKGTFFGNYKPRSDIPVVVEKYMNKEMELDKFITHRVPFSEINKAF |
| | | | DYMIRGESLRCIISMEN |
| 857 | 34 | Pla_l | EIMSSTTGQVIRCKAAVSWEAGKPLVIEEVEVAPPQKMEVRIKILFTSLCHTDVYF |
| | | | WEAKGQTPLFPRIFGHEAGGIVESVGEGVTDIQPGDHVLPVFTGECKECRHCKSA |
| | | | ESNMCDLLRINTDRGVMIQDGKSRFSKDGKPIHHFLGTSTFSEYTVVHVGCVAKI |
| | | | NPEAPLDKVCVLSCGFSTGFGATVNVAKPPQGSTVAIFGLGAVGLAAAEGARV |
| 858 | 34 | Poa_p | AQRTMATAGKVIKCKAAVAWEAGKPLSIEEVEVAPPQAMEVRVKILFTSLCHTDVF |
| | | | FWEPKVQKPLFPRIFGHEAGGIVESVGEGVTDVAPGDHVLPVFTGECKECRHCKS |
| | | | AESNMCDLLRINTDRGVMISDGKSRFSIDGKPIYHFVGTSTFSEYTVMHVGCVAKI |
| | | | NPEAPLDKVCVLSCGISTGLGASINVAKPPKGSTVAIFGLGAVGLAAAEGARIAGA |
| | | | SRIIGVDLNANRFEEARKFGCTEFVNPKDHTKPVQEVLAEMTDGGVDRSVECTGN |
| | | | INAMIQAFECVHDGWGVAVLVGVPHKDAEFKTHPMNFLNERTLKGTFFGNFKPRT |
| | | | DLPNVVEMYMKKELEVEKFITHSVPFSEINKAFDLMAKGEGIRCIIRMEH |
| 859 | 34 | Que_a | YYNIERKMENGLRNPSETTGKVITCKAAITWGPGEPFVIEEVRVDPPQKMEVRIKIL |
| | | | FTSICHTDLSAWQGENEAQRAYPRILGHEASGIVESVGEGVMDIKKGDHVVPIFN |
| | | | GECGDCLYCKCEKTNMCERAGVNPFMTVMVNDGKSRFSCKEGKPIFHFLNTSTFS |
| | | | EYTVVESACVVKIDPDASLKTMTLLSCGVSTGVGAAWNIANVKAGSTVAIFGLGA |
| | | | VGLAVAEGARARGATKIIGVDINPNKFTKGRAMGITDTINPRDFEKPVHECIREMT |
| | | | GGGVDYSFECAGISEVLREAFLSTHEGWGLTVILGIHTSPKMLPLHPMELFTGRVII |
| | | | ASVFGGFKGKTQLPNFAKECMQGVVNLEEFITHELPFEKINEAFQLLIDGKSVRCM |
| | | | LHL |
| 860 | 34 | Que_a | RIFGHEAGGIVESVGEGVTDLKPGDHALPVFTGECKECRHCKSEESNMCDLLRINT |
| | | | DRGVMLNDGKSRFSINGQPIYHFVGTSTFSEYTVLHVGSVAKINPAAPLDKVCVLS |
| | | | CGISTGLGATLNVAKPKKGSTVAVFGLGAVGLAAAEGARIAGASRIIGVDLNAKRF |
| | | | DEAKKFGVTEFVNPKDHDKPVHEVLAEMTNGGVDRSIECTGSINAMISAFECVHD |
| | | | GWGVAVLVGVPNKDDAFKTHPMNILNERTIKGTFFGNYKPRSDLPSVVEKYMNKE |
| | | | LELEKFITHEVSFSEINKAFEYMLRGEGLRCIIRMDA |
| 861 | 34 | Que_a | KAAIAWEAGKPLVIEQVEVAPPQTMEVRIKIKYTSLCHTDLYFWEAKGQTPLFPRIF |
| | | | GHEAAGVVESVGEGVSDLQVGDHVLPVFTGECGDCRHCKSEESNMCDLLRINTD |
| | | | RGVMLNDGKSRFSINGTPINHFLGTSTFSEYTVVHSGCLTKISPLAPLDKVCILSCG |
| | | | ISTGLGATLNVAKPKKGSTVAVFGLGAVGLAAAEGARIAGASRIIGIDLSPKRYEEA |
| | | | KKFGVTEFVNPKDHDRPVQEVIAEMTNGGVDRSIECTGNINCMISAFECVHDGW |
| | | | GVAVLVGVPNKDAVFMTKPINVLNERTLKGTFFGNYKPRTDLPSVVDMYMNKKLE |
| | | | VEKFITHRVPFSDINKAFEYMLKGEGLRCIISMEE |
| 862 | 34 | Que_a | AMSSTAGQVIKCKAAVAWEAGKPLVIEEVELAPPQANEVRMKILFTALCHTDVYF |
| | | | WEAKGQTPMFPRIFGHEAGGIVESVGEGVTELKPGDHVLPIFTGECGKCSHCNSE |
| | | | ESNLCDTLRINTERGVLLNDGKTRFSKNGQPIYHFLGTSTFSEYTIAHVGCVAKINP |
| | | | AAPLDKVCVLSCGVSTGMGATLNVAKPKKGQSVAVFGLGAVGLAACEGARMAGA |
| | | | GKIIGVDLNPDRFNEAKKFGVTDFVNPKDHDKPVQEVIAEMTNGGVDRAVECTGS |
| | | | FQAMIQAFECVHDGWGVAVLVGVPNKDDAFKTHPLNFLNERTLKGTFFGNYKPRT |
| | | | DIPSQVEKYMKKELELEKFITHSVPFSEINKAFDYMLKGESIRCIIRMDA |
| 863 | 34 | Que_a | AMSSTAGQVIKCRAAVAWEAGKPLVIEEVEVAPPQANEVRMRILFTALCHTDVYF |
| | | | WEAKGQTPLFPRIFGHEAGGIVESVGEGVTELKPGDHVLPIFTGECGKCSHCNSEE |
| | | | SNLCDTLRINTERGVLLNDGKTRFSKNGQPIYHFLGTSTFSEYTIAHVGCVAKINPA |
| | | | APLDKVCVLSCGVSTGMGATLNVAKPKKGQSVAVFGLGAVGLAACEGARMAGAG |
| | | | KIIGVDLNPDRFNEAKKFGVTDFVNPKDHDKPVQEVIAEMTDGGVDRALECTGSI |
| | | | QAMISAFECVHDGWGVAVLVGVPNKDDSFQTHPVNFLNERTLKGTFFGNYKPRT |
| | | | DIPSVVEKYMNKELELEKFITHSVPFSEINKAFDYMLKGQSIRCIIRMGA |
| 864 | 34 | Que_a | MATQGQVITCKAAVAWEPNKPLVIEDVQVAPPQAGEVRIKILFTALCHTDAYTWS |
| | | | GKDPEGLFPCILGHEAAGIVESIGEGVTEVQPGDHVIPCYQAECRECKFCKSGKTN |
| | | | LCGKVRSATGVGVMLSDRKSRFSVNGKSIYHFMGTSTFSQYTVVHDVSVAKIDPK |
| | | | APLEKVCLLGCGVPTGLGAVWNTAKVESGSIVAIFGLGTVGLAVAEGAKTAGASRI |
| | | | IGIDIDSKKFDTAKKFGVTEFVNPKDHEKPIQQVIVDLTDGGVDYSFECIGNVSVM |
| | | | RAALECCHKGWGTSVIVGVAASGQEISTRPFQLVTGRVWKGTAFGGFKSRSQVP |
| | | | WLVEKYLKKEIKVDEYITHNLTLGEINEAFHLMHEGGCLRCVLKV |
| 865 | 39_59 | Amb_a | VVSPPFVFLTTVKSELRPEIQVAAQNCWVKKGGAFTGEVSAEMLANLGVPWVILG |
| | | | HSERRALLNESNEFVGDKVAYALSQGLKVIACVGETLEQREAGTTMDVVAAQTKA |
| | | | IADKISSWDNVVLAYEPVWAIGTGKVASPAQAQEVHAGLRKWFEENISAEVSATT |
| | | | RIIYGGSVSGSNCKELAGQPDVDGFLVGGASLKPEFINIIKAAEAK |
| 866 | 39_59 | Amb_p | VSTLNAGDLPSTDIVEVVVSPPFVFLTTVKSELRPEIQVAAQNCWVKKGGAFTGEV |
| | | | SAEMLANLGVPWVILGHSERRALLNESNEFVGDKVAYALSQGLKVIACVGETLEQ |
| | | | REAGTTMDVVAAQTKAIADKISSWDNVVLAYEPVWAIGTGKVASPAQAQEVHAG |
| | | | LRKWFEENISAEVAATTRIIYGGSVSGSNCKELAGQPDVDGFLVGGASLKPEFINII |
| | | | KAAEAK |
| 867 | 39_59 | Bet_v | MARKFFVGGNWKCNGTTEEVKKIVSTLNEAQVPSQDVVEVVVSPPFVFLPLVKTLL |
| | | | RPDIHVAAQNCWVKKGGAYTGEVSAEMLVNLGIPWVILGHSERRLILNESNEFVG |
| | | | DKVAYALEKGLKVIACVGETLEQRESGSTVEIVAAQTKAIAERVSNWANVVLAYEP |
| | | | VWAIGTGKVATPAQAQEVHSELRKWLQANTSPEVAATTRIIYGGSVNGANCKELA |
| | | | AKPDVDGFLVGGASLKPEFIDIIKSAEVKKSA |
| 868 | 39_59 | Bet_v | RKFFVGGNWKCNGTAEEVKKIVSTLNEAEVPSEDVVEVVVSPPFVFLPLVKSLLRS |
| | | | DFHVAAQNCWVRKGGAFTGEISAEMLVNLGIPWVILGHSERRALLSESNEFVGDK |
| | | | VAYALSQGIKVIACVGET |
| 869 | 39_59 | Cyn_d | GGNWKCNGTGEDVKKIVTVLNEAEVPSEDVVEVVVSPPFVFLQQVKGLLRPDFSV |
| | | | AAQNCWVRKGGAFTGEISAEMLVNQQLPWVILGHSERRALLGESNDFVADKVAY |
| | | | ALSQGLKVIACIGETLEQREAGTTMDVVAAQTKAIAEKISDWTNVVLAYEPVWAIG |
| | | | TGKVASPAQAQEVHDGLRKWLQSAVSPAVAESTRIIYGGSVNGGNCKELAAQPD |
| | | | VDGFLVGGASLKPEFVDIIKSATVKSSS |
| 870 | 39_59 | Cyn_d | MGRKFFVGGNWKCNGTTEQVDKIVKTLNEGQIPSTDVVEVVVSPPYVFIPVVKTQ |
| | | | LRPEIQVAAQNCWVKKGGAYTGEVSAEMLANLGVPWVILGHSERRALLGESNEFV |
| | | | GDKVAYALAQGLKVIACVGETLEQRESGSTMDVVAAQTKAIAERIQDWTNVVVAY |
| | | | EPVWAIGTGKVATPAQAQEVHASLREWLKTNVSPEVSESTRITYGGSVTAANCKE |
| | | | LAGQPDVDGFLVGGASLKPEFIDIINSATVKSA |
| 871 | 39_59 | Que_a | MARKFFVGGNWKCNGTTEEVKKIVSTLNEGQVPPPDVVEVVVSPPFVFLPLVKNLL |
| | | | RPDFHVAAQNCWVKKGGAFTGEVSAEMLVNLGIPWVILGHSERRQILNETNEFVG |
| | | | EKVAYALSKGLKVIACVGETLEQRESGTTVEVVAAQTKAIAERVSNWADVVLAYEP |
| | | | VWAIGTGKVATPAQAQEVHFELRKWFHANISPEVAATIRITYGGSVNGANSKELAV |
| | | | QPDVDGFLVGGASLKPEFIDIIKSAEVKKSA |
| 872 | 43 | Amb_p | AASQWLYVVPWGLRKILNYISRKYNNPPIYITENGMDDEDNDASSLHEMLDDKLR |
| | | | IAYYKGYLASVFLAIKDGVDVRGYFAWSLVDNFEWPLGYTKRFGLVYIDYKNGLTR |
| | | | HPKSSAYWFMKLLKGE |
| 873 | 43 | Bet_v | LLSVIVIQCVAHATELNVNDTGGLGRHNFPKGFVFGTATSAYQVEGMAHKDGRGP |
| | | | SIWDPFVKIPGNIANNATADVSVDQYHRYKEDVDIMAKFNFDAYRFSISWSRIFPN |
| | | | GRGKVNWKGVAYYNRLIDYLLKRGITPYANLYHYDLPLALEMKYKGLLSDQVVKDF |
| | | | ADYADFCFKTFGDRVKNWMTFNEPRVVAALGYDNGIFAPGRCSKAFGNCTAGNS |
| | | | ATEPYIAAHHLILSHAAAVQRYRQKYQEKQKGRIGILLDFVWYEPLTKSKDDNNAA |
| | | | QRARDFHVGWFIHPIVYGEYPRTMQDIVADRLPRFTKEEVKMVKGSIDFVGINQYT |
| | | | AFYMYDPHQPKPKDLGYQQDWNVGFAYEKNGVPIGPRANSNWLYIVPWGLYKAL |
| | | | TYIKEHYGNPTVILSENGMDDPGNVTLSKGLHDTTRINFYTGYLTQLKKAVDEGAN |
| | | | VFGFFAWSLLDNFEWRSGYTSRFGIVYVDYTNLKRYPKMSAYWFKRLLRRNQ |
| 874 | 43 | Cyn_d | TMALSAHGKVGENTNLTRESFPPGFVFGTASSAYQVEGNANKYGRGPCIWDTFLM |
| | | | HPGTTPDNATANVTVDEYHRYMDDVDNMVRVGFDAYRFSISWSRIFPSGVGKIN |
| | | | KDGVDYYHRLIDYMLANKITPYVVLHHFDLPQVLQDQYNGWLSPRVVGDFEKFAD |
| | | | FCFKTYGDRVKNWFTINEPRMMAVHGYSDAFFAPARCTGCKVGGNSATEPYIAGH |
| | | | HLLLSHAAAVKTYREKYQAQQKGKIGILLDFVWYEPLSDSMEDGYAAHRARMFTL |
| | | | GWFLHPITYGHYPPSMENIVRGRLPNFTFEQSEMVKGSADYIGINHYTTYYASHYI |
| | | | NDTEMSYRNDWSVKLSYSRNGVPIGKKAYSDWLYVVPWGIYKAVMWTKEKFNN |
| | | | PVIIIGENGIDQPGNETLPGALYDTFRIDYFEQYLRELKSAVNDGANVIGYFAWSLL |
| | | | DTFEWRLGFTSKFGLVYVDRQTFTRYPKDSARWFRKVIKREE |
| 875 | 43 | Que_a | SMSLDSGGLSRDKFPKGFVFGTATSAYQVEGMAHKDGRGPSIWDTFVKIPGIVAN |
| | | | NGTADVSVDQYHRYKEDIDIMKKLNFDAYRFSISWSRIFPDGTGKVNHKGVAYYN |
| | | | RLINYLLRRGITPYANLYHYDLPLALEKKYKGLLSDQVVKDFADYADFCFRTFGDRV |
| | | | KNWMTFNEPRVVAALGYDNGFFAPGRCSKPYGNCTAGNSATEPYIVAHHLILAHA |
| | | | AAVQRYREKYLEKQKGRIGILLDFVWYEPLTRSKADNYAAQRARDFHVGWFIHPIV |
| | | | YGEYPRTMQDIVGDRLPKFTKEEVKMVKGSMDFVGINQYTAYYMYDPHKSKPKVL |
| | | | GYQQDWNAGFAYNKKGVPIGPKANSYWLYNVPWGLYKAITYIKEHYGNPTVILSE |
| | | | NGMDDPGNVTISKGLHDTTRINFYKGYLTQLKKAVDEGANVVGYFAWSLLDNFE |
| | | | WRLGYTSRFGIVYVDFANLKRYPKMSAYWFKRLLKRNK |
| 876 | 47 | Amb_a | VSGGSLIKSLRKLVEEPYVGSVDWSKWHMFWVDERVVPKDHPDSNYLLAFDGFL |
| | | | SKVPIPPGNVHAINDALSAEAAADDYETHIKHLVHNGIISTSETTGFPKFDLMLLGM |
| | | | GPDGHVASLFPGHPLLAEKSKWVTFIKESPKPPP |
| 877 | 47 | Amb_p | GGSLIKSLRKLVEEPYVGSVDWSKWHMFWVDERVVPKDHPDSNYLLAFDGFLSK |
| | | | VPIPPGNVHAINDALSAEAAADDYETHIKHLVHNGIISTSATTGFPKFDLMLLGMGP |
| | | | DGHVASLFPGHPLLAEKSKWVTFIKESPKPPPERITFTFPVINSSANVALVVAGAGK |
| | | | AHPVHVALGNGQEPEPLPVQMVAPEGQLAWFLDKDAASKL |
| 878 | 47 | Bet_v | MAATTAEKGGDKKKVEVFDTEEDLAVSLAKYTADLSDKFSKERGAFTVVLSGGSLI |
| | | | KSLRKLLEPPYIDSVEWSKWHVFWVDERVVPKDHEDSNYKLAYDGFLSKIPIVPG |
| | | | HVYAINDALSAEGAADDYETCLKHLVKINVIDLSAASGFPKFDLMLLGMGPDGHV |
| | | | ASLFPGHPLLKENEKWVTFIKDSPKPPPERITFTFPVVNSSAYIALVVAGAGKAGVV |
| | | | QQALGNGQNSDKLPVQIVSPEGELTWFLDKDAASKL |
| 879 | 47 | Cyn_d | SATAAAAVAFLPPLTGRTSPPAYRVPANSRRGSVSNSRIFTSFAPSPILRAAAMATD |
| | | | GAAPAASDAGSKQKLLTFDSEEELAVSLAKYTAELSAKFAAERGAFTAVLSGGSLI |
| | | | KALRKLTEPPYLDSVDWSKWHVFWVDERVVPKDHEDSNYKLALDGFLSKVPIPTR |
| | | | QVYAINDALSAEGAADDYETCLKQLVKNGVIAMSAATGFPRFDLQLLGMGPDGHI |
| | | | ASLFPGHPLVNENQKWVTYIKDSPKPPPERITFTFPVINSSAYIAMVVTGAGKAAAV |
| | | | QKALSDKEISSDKLPVEMAVLQDGEFTWFTDKEAVSLLQNK |
| 880 | 47 | Que_a | MATKGEVKKEVFESGEDLAVALAKYTAQLSDKFCKERGAFSVVLSGGSLINSLRKL |
| | | | VEPPYIDSIEWSRWHIFWADERVVPKDHEDSNYKLAYDGFLSKVPIPPGNVYAIND |
| | | | ALSAEGAAEDYETCLRHLVKSNVVDISAASGFPKFDLQLLGMGPDGHVASLFPGH |
| | | | PLVKENEKWVAFIKDSPKPPPERITFTFPVINSSAYIALVVNGANKAGAVQNALGNS |
| | | | QNSEKLPVAMVSPEGELAWFLDTAAASKL |
| 881 | 49 | Amb_a | MGPGEWSPEMRKTYNLLDAVSRHTIQVYPRSWTAIMLTFDNAGMWSVRSNIWER |
| | | | HYLGEQFYISVTSPERSLRDEYNMPDNALRCGKVVGLPLPPSYAAA |
| 882 | 49 | Amb_p | MGPGEWSPELRKTYNLLDAVSRNSIQVYPRSWTAVMLTFDNAGMWNVRSNLWE |
| | | | RHYLGEQFYISVVSPARSLRDEYNMPEDDLRCGKVVGLPMPPSYLPA |
| 883 | 49 | Bet_v | IEPGRWSPVKRKNYNLLDAVSRHNIQVYPNSWAAIMTTLDNAGMWSLRSEMWER |
| | | | VYLGQQLYFSVLSPARSLRDEYNLPDNTPLCGIVPGLPLPPPY |
| 884 | 49 | Cyn_d | MGPGTWSPQSRKTYNLLDTVSRHTIQVYPRSWTAVMLTFDNAGMWNVRSNLWE |
| | | | RQYLGEQMYISVISPARSLRDEYNMPETSLRCGKVVGLPMPPSYLPA |
| 885 | 49 | Que_a | MGPGEWSPELRKTYNLLDAVSRNSIQVYPRSWTAVMLTFDNAGMWNVRSNLWE |
| | | | RHYLGEQFYISVVSPARSLRDEYNMPEDDLRCGKVVGLPMPPSYLPA |
| 886 | 54 | Amb_a | GVELARRDMATTTRVAAGVLLVLSALALVARAEDPYLFFEWKVTYGTKPVLGVPQK |
| | | | VILINGEFPGPRINCTSNNNIVVNVFNQLDHPLLFTWNGMQHRKNSWMDGMPGT |
| | | | QCPILPNTNFTYKWQPKDQIGSFYYFPSIGMQRAAGGYGGISVYSRLLIPVPFDQP |
| | | | PPENDHVVLIGDWYTKDHEVLARQLDAGKSVGRPAGVVINGKGGKDLEAAPLFTF |
| | | | EAGKTYRLRVCNTGIKASLNFRIQGHIMTLVELEGSHTLQDVYDSLDVHVGHCLSV |
| | | | LVDADQKPGDYYMVASTRFIHDAKSAKAIIRYAGSSAPPPAELPEPPAGWAWSIN |
| | | | QARSFRWNLTSSAARPNPQGSYHYGQINITRTIKVRVSRGHINGKLRYGFSGVSH |
| | | | RDPETPVKLAEYFNVTDGVFSYNQMGDVPPAVNGPLHVVPNVITAEFRTFIEIVFEN |
| | | | PEKSLDSVHLDGYAFFGVGMGPGEWSPEMRKTYNLLDAVSRHTIQVYPRSWTAI |
| | | | MLTFDNAGMWSVRSNIWERHYLGEQFYISVTSPERSLRDEYNMPDNALRCGKVV |
| | | | GLPLPPSYAAA |
| 887 | 54 | Amb_p | AMGRTTFVALFICLSAGALMVHAEDPYHFFEWNVTYGTIAPLGVPQQGILINGQFP |
| | | | GPKINCTSNNNIVVNVFNHLDEPFLLTWNGVQQRKNSWQDGTLGTMCPILPGKN |
| | | | FTYHFQVKDQIGSFYYFPTTGLHKASGAIGGLQVHSRDLIPVPFDNPADEYFLLLGD |
| | | | WYNKGHKSLKKLLDSGRSIGRPDGIQINGKSGKVGDEAAEPLFTMESGKTYRYRV |
| | | | CNVGMRTSINFRLQGHTLKLVEMEGSHTVQNVYDSLDLHAGQCLSVLITANQAPK |
| | | | DYYLVVSSRFAQHQLSSVAIIRYLNGNSPASLELPPSPPDNTEGIAWSINQFRSFR |
| | | | WNLTASAARPNPQGSYHYGQINITRTIKLANSRSYVDGKLRFGLNGVSHVDSETP |
| | | | LKLAEYFEASDKLFKYDIIKDEPPQDDTKVILAPNVLNATFRNFVEIIFENHERTIQT |
| | | | YHLDGYSFFAVAIEPGRWSPEKRKNYNLLDAVSRHSIQVYPNSWAAVMTTLDNAG |
| | | | MWSLRSEMWERVYLGQQLYFSVLSPARSLRDEYNLPDNTPLCGIVPGLPLPPPY |
| 888 | 54 | Bet_v | RGRKMGGVMFILMLCLTAGAMSGVRGEDPYLFFTWNVTYGTISPLGVPQQGILIN |
| | | | GQFPGPNINSTTNNNIVINVHNSLHEPFLLTWSGIQHRKNSWQDGVLGTMCPIPP |
| | | | GTNYTYHFQVKDQIGSYTYYPTTATHRAAGAFGGLRVNSRLLIPVPYADPEDDYTVL |
| | | | IGDWYAKSHQTLRKFLDSGRSLGRPDGVLINGKSGKDKPLFTMKAGKTYKYRICN |
| | | | VGVKNSLNFRIQGHTMKLVELEGSHTVQNTYQSLDVHVGQCLSVLVTADQKPKD |
| | | | YYVVASTRFTKSVLTGKGIIRYIGGKGPASPEIPEAPVGWAWSLNQFRTFRWNLTA |
| | | | SAARPNPQGSFHYGAINITRTIKLVNSASKVDGKHRYAVNGISHIDPPTPLKLAEYY |
| | | | GVADKVFKYDTIPDDPPAQGAPNITSAPVVLNMTFRNFVETIFENHEKSIQSWHLD |
| | | | GYSFFAVAIEPGRWTPERRRNYNLLDAVSRHTVQVFPKSWAAILLTFDNAGMWNI |
| | | | RSEIVERRYLGQQLYASILSPARSLRDEYNIPDNALLCGLVKNLPKPPPYV |
| 889 | 54 | Cyn_d | GVLLVLTALAVVHAEDPYLFFEWKVTYGTKSLLGVPQKVILINGEFPGPRINCSSNN |
| | | | NIVVNVFNQLDQPLLFTWNGMQHRKNSWMDGLPGTNCPIAPGTNFTYKWQPKD |
| | | | QIGSFFYFPSLGMQRAAGGYGPISVVSRLLIPVPFDPPADDHVVLIGDWYTKDHEV |
| | | | MARLLDSGRSIGRPAGVLINGKGGKDAAAAPIFTFEAGKTYRLRVCNTGIKSSLNF |
| | | | RIQGHDMKLVEMDGSHTVQDMFDSLDVHPGHCFSVLVDADQKPGDYYVVASTR |
| | | | FIHDPKSVSAVIRYAGSSTPPAPHVPEPPEGWAWSINQWRSFRWNLTASAARPNP |
| | | | QGSYHYGQINITRTIKLQISRGHIDGKLRYGFNGVSHVDADTPLKLAEYFNVTDGV |
| | | | FKYNQMGDAPPAVNGPLRVMPSVISAEFRTFIEVIFENPEKSMDSLHLDGYAFFAV |
| | | | GMGPGKWSPELRKTYNLLDAVSRHTIQVYPRSWTAIMLTFDNAGMWNVRSNIWE |
| | | | RHYLGEQVYVSVISPERSLRDEYNMPENALRCGKVIGLPLPPSYNPA |
| 890 | 54 | Que_a | AMGRMTFVELFLCLSAGALMVHAEDPYHFFEWNVTYGTIAPLGVPQQGILINGQFP |
| | | | GPKINCTSNNNIVVNVFNNLDEPFLLTWNGVQHRKNSWQDGTLGTMCPILPGKN |
| | | | FTYHFQVKDQIGSFYYFPTTGLHKASGAIGGLQVHSRDLIPVPFDNPADEYFVVLG |
| | | | DWYNKGHKSLKKLLDSGRSIGRPDGIQINGKSGKVGDKVAEPLFTMESGKTYRYR |
| | | | VCNVGMRTSVNFRLQGHTLKLVEMEGSHTVQNVYDSLDLHAGQCLSVLITANQA |
| | | | PKDYYLVVSSRFAQHQLSSVAIIRYLNGNSPASLELPPSPPDNTEGIAWSINQFRSF |
| | | | RWNLTASAARPNPQGSYHYGQINITRTIKLTNSRSYVDGKLRFGLNGVSHVDSET |
| | | | PLKLAEYFEASDKVFKYDLMKDEPPQENTKVTLAPNVLNATFRNFVEIIFENHERTI |
| | | | QTYHLDGYSFFAVAIEPGRWSPEKRKNYNLLDAVSRHSIQVYPNSWAAIMTTLDN |
| | | | AGMWSLRSEMWERVYLGQQLYFSVLSPARSLRDEYNMPDNTPLCGIVRGLPLPPP |
| | | | Y |
| 891 | 49_54 | Amb_p | NITRTIKLKITRGHLDGKLKYGFNGVSHVDADTPLKLAEYFNVTDGVFRYNQMGDS |
| | | | PPGVNGPLHAIPNVITAEFRTFIEIIFENPEKSMDSLHLDGYAFFAVGMGPGEWSPE |
| | | | LRKTYNLLDAVSRNSIQVYPRSWTAVMLTFDNAGMWNVRSNLWERHYLGEQFYI |
| | | | SVVSPARSLRDEYNMPEDDLRCGKVVGLPMPPSYLPA |
| 892 | 49_54 | Amb_p | LWERHYLGEQMYISVISPARSLRDEYNMPETSLRCGKVVGLPMPPSYLPA |
| 893 | 49_54 | Amb_p | AATAGGVLLLALLVLSTTQVARAEDPYLFFEWHVTYGTRTLLGVPQKVILINDEFPG |
| | | | PRINCSSNNNIVVNVFNQLEEPLLFTWNGMQQRKNSWQDGLPGTNCPVAPGTNY |
| | | | TFKWQAKDQIGSFFYFPSLGMQRAAGGYGMISVVSRLLIPVPFDPPADDHVVLIG |
| | | | DWYTKDHTVMASLLDAGKSPGRPAGVLINGKGGNDAASQPMFTFEAGKTYRLRV |
| | | | CNVGIKSSLNFRIQGHDMKLVEMEGSHTLQNTYDSLDVHVGQCLSVLVDADQKP |
| | | | ADYLMVASTRFIADATSVSAVIRYAGSNTPAAANVPEPPAGWAWSINQWRSFRW |
| | | | NLTASAARPNPQGSYHYGQINITRT |
| 894 | 49_54 | Amb_p | AATAGGVLLLALLVLSTTQVARAEDPYLFFEWHVTYGTRTLLGVPQKVILINDEFPG |
| | | | PRINCSSNNNIVVNVFNQLDQPLLFTWNGMQHRKNSWMDGLPGTNCPIAPGTNF |
| | | | T |
| 895 | 49_54 | Ant_o | PPPSYSHKPGDVFHGRLLIDPPIPPQLLHYNPSRERNLFHSVRRPLILMATTMRGTA |
| | | | ATAGGVLLLALLVLSTTQVARAEDPYLFFEWHVTYGTRTLLGVPQKVILINDEFPGP |
| | | | RINCSSNNNIVVNVFNQLEEPLLFTWNGMQQRKNSWQDGLPGTNCPVAPGTNYT |
| | | | FKWQAKDQIGSFFYFPSLGMQRAAGGYGMISVVSRLLIPVPFDPPADDFQVLVGD |
| | | | WYTKDHTVMASLLDAGKSPGRPAGVLINGKGGKDAASQPMFTFEAGKTYRLRVC |
| | | | NVGIKSSLNFRIQGHDMKLVEMEGSHTLQNTYDSLDVHVGQCLSVLVDADQKPA |
| | | | DYLMVASTRFIADATSVSAVIRYAGSNTPPAANVPEPPAGWAWSINQWRSFRWN |
| | | | LTASAARPNPQGSYHYGQINITRTIKLKITRGHLDGKLKYGFNGVSHVDADTPLKL |
| | | | AEYFNVTDGVFRYNQMGDSPPGVNGPLHAIPNVITAEFRTFIETIFENPEKSMDSLH |
| | | | LDGYAFFAVGMGPGEWSPELRKTYNLLDAVSRNSIQVYPRSWTAVMLTFDNAGM |
| | | | WNVRSNLWERHYLGEQFYISVVSPARSLRDEYNMPEDDLRCGKVVGLPMPPSYLP |
| | | | A |
| 896 | 49_54 | Ant_o | PPPSYSHKPGDVFHGRLLIDPPIPPQLLHYNPSRERNLFHSVRRPLILMATTMRGTA |
| | | | ATAGGVLLLALLVLSTTQVARAEDPYLFFEWHVTYGTRTLLGVPQKVILINDEFPGP |
| | | | RINCSSNNNIVVNVFNQLEEPLLFTWNGMQQRKNSWQDGLPGTNCPVAPGTNYT |
| | | | FKWQAKDQIGSFFYFPSLGMQRAAGGYGMISVVSRLLIPVPFDPPADDFQVLVGD |
| | | | WYTKDHTVMASLLDAGKSPGRPAGVLINGKGGKDAASQPMFTFEAGKTYRLRVC |
| | | | NVGIKSSLNFRIQGHDMKLVEMEGSHTLQNTYDSLDVHVGQCLSVLVDADQKPA |
| | | | DYLMVASTRFIADATSVSAVIRYAGSNTPPAANVPEPPAGWAWSINQWRSFRWN |
| | | | LTASAARPNPQGSYHYGQINITRTIKLKITRGHLDGKLKYGFNGVSHVDADTPLKL |
| | | | AEYFNATKGIFEYNLIGDTPPPEGTPIKLAPNVINTEWRTYIEVVFENPEKSIDSFHL |
| | | | NGYAFFAAGMGPGLWTPECRQTYNLLDTVSRHTIQVYPRSWTAVMLTFDNAGMW |
| | | | NLRSNLWERYYMGEQMYISCVSPARSLRDEYNMPENGLRCGNVIGLPLPPSYIPG |
| 897 | 49_54 | Bet_v | IDRGRKMGGVMFILMLCLTAGAMSGVRGEDPYLFFTWNVTYGTISPLGVPQQGILI |
| | | | NGQFPGPNINSTTNNNIVINVHNSLHEPFLLTWSGIQHRKNSWQDGVLGTMCPIP |
| | | | PGTNYTYHFQVKDQIGSYIYYPTTATHRAAGAFGGLRVNSRLLIPVPYADPEDDYTV |
| | | | LIGDWYAKSHQTLRKFLDSGRSLGRPDGVLINGKSGKDKPLFTMKAGKTYKYRIC |
| | | | NVGVKNSLNFRIQGHTMKLVELEGSHTVQNTYQSLDVHVGQCLSVLVTADQKPK |
| | | | DYYVVASTRFTKSVLTGKGIIRYIGGKGPASPEIPEAPVGWAWSLNQFRTFRWNLT |
| | | | ASAARPNPQGSFHYGAINITRTIKLVNSASKVDGKHRYAVNGISHIDPPTPLKLAEY |
| | | | YGVADKVFKYDTIPDDPPAQGAPNITSAPVVLNMTFRNFVEIIFENHEKSIQSWHL |
| | | | DGYSFFAVAIEPGRWTPERRRNYNLLDAVSRHTVQVFPKSWAAILLTFDNAGMWN |
| | | | IRSEIVERRYLGQQLYASILSPARSLRDEYNIPDNALLCGLVKNLPKPPPYSI |
| 898 | 49_54 | Bet_v | IDRGRKMGGVMFILMLCLTAGAMSGVRGEDPYLFFTWNVTYGTISPLGVPQQGILI |
| | | | NGQFPGPNINSTTNNNIVINVHNSLHEPFLLTWSGIQHRKNSWQDGVLGTMCPIP |
| | | | PGTNYTYHFQVKDQIGSYIYYPTTATHRAAGAFGGLRVNSRLLIPVPYADPEDDYTV |
| | | | LIGDWYAKSHQTLRKFLDSGRSLGRPDGVLINGKSGKDKPLFTMKAGKTYKYRIC |
| | | | NVGVKNSLNFRIQGHTMKLVELEGSHTVQNTYQSLDVHVGQCLSVLVTADQKPK |
| | | | DYYVVASTRFTKSVLTGKGIIRYIGGKGPASPEIPEAPVGWAWSLNQFRTFRWNLT |
| | | | ASAARPNPQGSFHYGAINITRTIKLVNSASKVDGKHRYAVNGISHIDPPTPLKLAEY |
| | | | YGVADKVFKYDTIPDDPPAQGAPNITSAPVVLNMTFRNFVEIIFENHEKSIQSWHL |
| | | | DGYSFFAVAIEPGRWTPERRRNYNLLDAVSRHTVQVFPKSWAAILLTFDNAGMWN |
| | | | IRSEIVERRYLGQQLYASILSPARSLRDEYNIPDNALLCGLVKNLPKPPPYVI |
| 899 | 49_54 | Bet_v | IFENHERTIQTYHLDGYSFFAVAIEPGRWSPVKRKNYNLLDAVSRHNIQVYPNSWA |
| | | | AIMTTLDNAGMWSLRSEMWERVYLGQQLYFSVLSPARSLRDEYNLPDNTPLCGIV |
| | | | PGLPLPPPYTA |
| 900 | 49_54 | Cyn_d | TIAQTPHYTFHSREHHITRARPASVCLPREHFGRRPAGIMAATMRAAAAGVLLVLT |
| | | | ALAVVHAEDPYLFFEWKVTYGTKSLLGVPQKVILINGEFPGPRINCSSNNNIVVNVF |
| | | | NQLDQPLLFTWNGMQHRKNSWMDGLPGTNCPIAPGTNFTYKWQPKDQIGSFFYF |
| | | | PSIAMQRSAGGYGLISVHSRDLIPVPFDIPADDFAVLAGDWYTKDHTVLAKHLDA |
| | | | GKGIGRPAGLIINGKNDKDAASAPMYNFEAGKTYRFRVCNVGIKASLNVRVPGHN |
| | | | LKLVEMEGSHTVQNMYDSLDVHVGQCLSFLVTADQKPADYFLVVSTRFIKEVSTIT |
| | | | ALIRYKGSSTPPSPKLPEGPSGWAWSINQWRSFRWNLTASAARPNPQGSYHYGQ |
| | | | INITRTIKLQISRGHIDGKLRYGFNGVSHVDADTPLKLAEYFNATDGVFQYNLISDV |
| | | | PPKAGTPIKLAPNVLSAEFRTFIEVVFENPEKSIDSFHIDGYAFFAAGMGPGTWSPQ |
| | | | SRKTYNLLDTVSRHTIQVYPRSWTAVMLTFDNAGMWNVRSNLWERQYLGEQMYI |
| | | | SVISPARSLRDEYNMPETSLRCGKVVGLPMPPSYLPA |
| 901 | 49_54 | Cyn_d | TIAQTPHYTFHSREHHITRARPASVCLPREHFGRRPAGIMAATMRAAAAGVLLVLT |
| | | | ALAVVHAEDPYLFFEWKVTYGTKSLLGVPQKVILINGEFPGPRINCSSNNNIVVNVF |
| | | | NQLDQPLLFTWNGMQHRKNSWMDGLPGTNCPIAPGTNFTYKWQPKDQIGSFFYF |
| | | | PSLGMQRAAGGYGPISVVSRLLIPVPFDPPADDHVVLIGDWYTKDHEVMARLLDS |
| | | | GRSIGRPAGVLINGKGGKDAAAAPIFTFEAGKTYRLRVCNTGIKSSLNFRIQGHDM |
| | | | KLVEMDGSHTVQDMFDSLDVHPGHCFSVLVDADQKPGDYYVVASTRFIHDPKSV |
| | | | SAVIRYAGSSTPPAPHVPEPPEGWAWSINQWRSFRWNLTASAARPNPQGSYHYG |
| | | | QINITRTIKLQISRGHIDGKLRYGFNGVSHVDADTPLKLAEYFNVTDGVFKYNQMG |
| | | | DAPPAVNGPLRVMPSVISAEFRTFIEVIFENPEKSMDSLHLDGYAFFAVGMGPGKW |
| | | | SPELRKTYNLLDAVSRHTIQVYPRSWTAIMLTFDNAGMWNVRSNIWERHYLGEQV |
| | | | YVSVISPERSLRDEYNMPENALRCGKVIGLPLPPSYNPAR |
| 902 | 49_54 | Cyn_d | TIAQTPHYTFHSREHHITRARPASVCLPREHFGRRPAGIMAATMRAAAAGVLLVLT |
| | | | ALAVVHAEDPYLFFEWKVTYGTKSLLGVPQKVILINGEFPGPRINCSSNNNIVVNVF |
| | | | NQLDQPLLFTWNGMQHRKNSWMDGLPGTNCPIAPGTNFTYKWQPKDQIGSFFYF |
| | | | PSLGMQRAAGGYGPISVVSRLLIPVPFDPPADDHVVLIGDWYTKDHEVMARLLDS |
| | | | GRSIGRPAGVLINGKGGKDAAAAPIFTFEAGKTYRLRVCNTGIKSSLNFRIQGHDM |
| | | | KLVEMDGSHTVQDMFDSLDVHPGHCFSVLVDADQKPGDYYVVASTRFIHDPKSV |
| | | | SAVIRYAGSSTPPAPHVPEPPEGWAWSINQWRSFRWNLTASAARPNPQGSYHYG |
| | | | QINITRTIKLQISRGHIDGKLRYGFNGVSHVDADTPLKLAEYFNATDGVFQYNLISD |
| | | | VPPKAGTPIKLAPNVLSAEFRTFIEVVFENPEKSIDSFHIDGYAFFAAGMGPGTWSP |
| | | | QSRKTYNLLDTVSRHTIQVYPRSWTAVMLTFDNAGMWNVRSNLWERQYLGEQM |
| | | | YISVISPARSLRDEYNMPETSLRCGKVVGLPMPPSYLPA |
| 903 | 49_54 | Cyn_d | TIAQTPHYTFHSREHHITRARPASVCLPREHFGRRPAGIMAATMRAAAAGVLLVLT |
| | | | ALAVVHAEDPYLFFEWKVTYGTKSLLGVPQKVILINGEFPGPRINCSSNNNIVVNVF |
| | | | NQLDQPLLFTWNGMQHRKNSWMDGLPGTNCPIAPGTNFTYKWQPKDQIGSFFYF |
| | | | PSIAMQRSAGGYGLISVHSRDLIPVPFDIPADDFAVLAGDWYTKDHTVLAKHLDA |
| | | | GKGIGRPAGLIINGKNDKDAASAPMYNFEAGKTYRFRVCNVGIKASLNVRVPGHN |
| | | | LKLVEMEGSHTVQNMYDSLDVHVGQCLSFLVTADQKPADYFLVVSTRFIKEVSTIT |
| | | | ALIRYKGSSTPPSPKLPEGPSGWAWSINQWRSFRWNLTASAARPNPQGSYHYGQ |
| | | | INITRTIKLQISRGHIDGKLRYGFNGVSHVDADTPLKLAEYFNVTDGVFKYNQMGD |
| | | | APPAVNGPLRVMPSVISAEFRTFIEVIFENPEKSMDSLHLDGYAFFAVGMGPGKWS |
| | | | PELRKTYNLLDAVSRHTIQVYPRSWTAIMLTFDNAGMWNVRSNIWERHYLGEQVY |
| | | | VSVISPERSLRDEYNMPENALRCGKVIGLPLPPSYNPAR |
| 904 | 49_54 | Fra_e | ITRTIKLKITRGHLDGKLKYGFNGVSHVDADTPLKLAEYFNVTDGVFRYNQMGDSP |
| | | | PGVNGPLHAIPNVITAEFRTFIEIIFENPEKSMDSLHLDGYAFFAVGMGPGEWSPEL |
| | | | RKTYNLLDAVSRNSIQVYPRSWTAVMLTFDNAGMWNVRSNLWERHYLGEQFYIS |
| | | | VVSPARSLRDEYNMPEDDLRCGKVVGLPMPPSYLPA |
| 905 | 49_54 | Fra_e | ITRTIKLKITRGHLDGKLKYGFNGVSHVDADTPLKLAEYFNVTDGVFRYNQMGDSP |
| | | | PGVNGPLHAIPNVITAEFRTFIEIIFENPEKSMDSLHLDGYAFFAVGMGPGEWSPEL |
| | | | RKTYNLLDAVSRNSIQVYPRSWTAVMLTFDNAGMWNVRSNLWERQYLGEQMYIS |
| | | | VISPARSLRDEYNMPETSLRCGKVVGLPMPPSYLPA |
| 906 | 49_54 | Fra_e | ISVVSRLLIPVPFDPPADDLQVLIGDWYTKDHAVMASLLDAGKSFGRPAGVLINGR |
| | | | GGKDATNPPMFTFEAGKTYRLRVCNVGIKSSLNFRIQGHDMKLVEMEGSHTLQNT |
| | | | YDSLDVHVGQCLSVLVDADQKPADYLMVASTRFMVEPSSVSAV |
| 907 | 49_54 | Fra_e | PPSYSHKPGDVFHGRLLIDPPIPPQLLHYNPSRERNLFHSVRRPLILMATTMRGTAA |
| | | | TAGGVLLLALLVLSTTQVARAEDPYLFFEWHVTYGTRTLLGVPQKVILINDEFPGPRI |
| | | | NCSSNNNIVVNVFNQLEEPLLFTWNGMQQRKNSWQDGLPGTNCPVAPGTNYTYK |
| | | | WQPKDQIGSFFYFPSIGMQRAVG |
| 908 | 49_54 | Fra_e | WKVTYGTKNIMGTPQKVILINDMFPGPTINCTSNNNIVINVFNMLDQPLLFTWHGI |
| | | | QQRKNSWQDGMPGTNCPV |
| 909 | 49_54 | Lol_p | PLSHFHRPPHATHRSTAAAALIDLHTSRPEEETRRARRDMTAGSRMRACAAAAVL |
| | | | ALALLAVAVRAEDPYLFFEWKVTYGTRSPMGVPQKMILINDAFPGPTINCTSNNNII |
| | | | VNVFNQIDKPLLFTWHGIQQRKNSWQDGMPGAMCPIMPGTNFTYKMQFKDQIGT |
| | | | FFYFPSIGMQRAAGGYGLISIHSRPLIPIPFDPPAADFSAMIGDWFTKDHTVLEKHL |
| | | | DTGKTIGRPAGLLINGKNEKDASNPPMYEVEAGKTYRFRICNVGIKASLNVRVQGH |
| | | | ITRLVEMEGSHTVQNEYDSIDVHVGQCLSVLVTANQKPGDYFFVASTRFIKEVNTI |
| | | | TAVIRYKGSNTPPSPKLPEAPSGWAWSINQWRSFRWNLTASAARPNPQGSYHYG |
| | | | QINITRTIKLMVTRGHLEGKLKYGFNGVSHVDADTPLKLAEYFNVSDKVFKYNQM |
| | | | GDSPPGVNGPMHVAPNVITAEFRTFIEVVFENPEKSMDSLHIDGYAFFAVGMGPG |
| | | | KWSPDLRKTYNLLDAVSRHTIQVYPRSWSAVMLTFDNAGMWNLRSNLWERYYM |
| | | | GEQLYVSCTSPARSLRDEYNMPENGLRCGKIVGLPLPAPYIIA |
| 910 | 49_54 | Lol_p | PLSHFHRPPHATHRSTAAAALIDLHTSRPEEETRRARRDMTAGSRMRACAAAAVL |
| | | | ALALLAVAVRAEDPYLFFEWKVTYGTRSPMGVPQKMILINDAFPGPTINCTSNNNII |
| | | | VNVFNQIDKPLLFTWHGIQQRKNSWQDGMPGAMCPIMPGTNFTYKMQFKDQIGT |
| | | | FFYFPSIGMQRAAGGYGLISIHSRPLIPIPFDPPAADFSAMIGDWFTKDHTVLEKHL |
| | | | DTGKTIGRPAGLLINGKNEKDASNPPMYEVEAGKTYRFRICNVGIKASLNVRVQGH |
| | | | ITRLVEMEGSHTVQNEYDSIDVHVGQCLSVLVTANQKPGDYFFVASTRFIKEVNTI |
| | | | TAVIRYKGSNTPPSPKLPEAPSGWAWSINQWRSFRWNLTASAARPNPQGSYHYG |
| | | | QINITRTIKLMVTRGHLEGKLKYGFNGVSHVDADTPLKLAEYFNVSDKVFKYNQM |
| | | | GDSPPGVNGPMHVAPNVITAEFRTFIEVVFENPEKSMDSLHIDGYAFFAVGMGPG |
| | | | KWSPDLRKTYNLLDAVSRHTIQVYPRSWSAVMLTFDNAGMWNVRSNLWERHYL |
| | | | GEQLYISVISPARSLRDEYNMPETALRCGKVVGLPLPPSYLPA |
| 911 | 49_54 | Lol_p | IPYPAATPTLLSFKRAELDSARQVFHPARLPPILMAATTMRATAAGGVLLLALLLVTT |
| | | | NVARAEDPYVFFEWHVTYGTKSLLGVPQKVILINGEFPGPRINCSSNNNIVVNVFN |
| | | | QLDQPLLFTWNGIQHRKNSWQDGMPGTNCPVVPGTNYTFKWQAKDQIGSFFYFP |
| | | | SIGMQRTVGGYGLISVVSRLLIPVPFDPPADDLQVLIGDWYNKDHTVMASLLDAG |
| | | | KSPGRPAGVLINGRGAKDAANPPMFTFEAGKTYRLRICNVGIKASLNFRIQGHDM |
| | | | RLVEMDGSHTVQDSFDSLDVHVGHCLSVLVDADQKPADYLMVASTRFMVEPSSV |
| | | | SAVIRYAGSNTPPAPNVPEPPAGWAWSLNQWRSFRWNLTASAARPNPQGSYHYG |
| | | | QINITRTIKLMVTRGHLEGKLKYGFNGVSHVDADTPLKLAEYFNVSDKVFKYNQM |
| | | | GDSPPGVNGPMHVAPNVITAEFRTFIEVVFENPEKSMDSLHIDGYAFFAVGMGPG |
| | | | KWSPDLRKTYNLLDAVSRHTIQVYPRSWSAVMLTFDNAGMWNVRSNLWERHYL |
| | | | GEQLYISVISPARSLRDEYNMPETALRCGKVVGLPLPPSYLPA |
| 912 | 49_54 | Lol_p | IPYPAATPTLLSFKRAELDSARQVFHPARLPPILMAATTMRATAAGGVLLLALLLVTT |
| | | | NVARAEDPYVFFEWHVTYGTKSLLGVPQKVILINGEFPGPRINCSSNNNIVVNVFN |
| | | | QLDQPLLFTWNGIQHRKNSWQDGMPGTNCPVVPGTNYTFKWQAKDQIGSFFYFP |
| | | | SIGMQRTVGGYGLISVVSRLLIPVPFDPPADDLQVLIGDWYNKDHTVMASLLDAG |
| | | | KSPGRPAGVLINGRGAKDAANPPMFTFEAGKTYRLRICNVGIKASLNFRIQGHDM |
| | | | RLVEMDGSHTVQDSFDSLDVHVGHCLSVLVDADQKPADYLMVASTRFMVEPSSV |
| | | | SAVIRYAGSNTPPAPNVPEPPAGWAWSLNQWRSFRWNLTASAARPNPQGSYHYG |
| | | | QINITRTIKLMVTRGHLEGKLKYGFNGVSHVDADTPLKLAEYFNVSDKVFKYNQM |
| | | | GDSPPGVNGPMHVAPNVITAEFRTFIEVVFENPEKSMDSLHIDGYAFFAVGMGPG |
| | | | KWSPDLRKTYNLLDAVSRHTIQVYPRSWSAVMLTFDNAGMWNLRSNLWERYYM |
| | | | GEQLYVSCTSPARSLRDEYNMPENGLRCGKIVGLPLPAPYIIA |
| 913 | 49_54 | Ole_e | IQVYPRSWSAVMLTFDNAGMWNVRSNIWERHYLGEQVYVSVISPERSLRDEYNM |
| | | | PENALRCGKVIGLPLPPSYNPAR |
| 914 | 49_54 | Ole_e | PRINCSSNNNIVVNVFNQLDQPLLFTWNGMQHRKNSWMDGLPGTNCPIAPGTNF |
| | | | TYKWQPKDQIGSFFYFPS |
| 915 | 49_54 | Ole_e | GANLFHSARRPLILMATTMRGTAATAGGVLLLALLVLSTTQVARAEDPYLFFEWHV |
| | | | TYGTRTLLGVPQKVILINDEFPGPRINCSSNNNIVVNVFNQLEEPLLFTWNGMQQR |
| | | | KNSWQDGLPGTNCPVAPGTNYTYKWQPKDQIGSFFYFPSIGMQRAVGGYGLISV |
| | | | VSRLLIPVPFDPPADDLQVLIGDWYTKDHAVMASLLDAGKSFGRPAGVLINGRGG |
| | | | KDATNPPMFTFEAGKTYRLRVCNVGIKSSLNFRIQGHDMKLVEMEGSHTLQNTYD |
| | | | SLDVHVGHCLSVLVDADQKPADYLMV |
| 916 | 49_54 | Pla_l | DQVFKYNQMGDSPPGVNGPMHITPNVITAEFRTFIEVVFENPEKSMDSLHLDGYAF |
| | | | FAVGMGPGKWKPELRKTYNLLDAVSRHSIQVYPRSWSAVMLTFDNAGMWNLRS |
| | | | NLWERYYMGEQLYVSCTSP |
| 917 | 49_54 | Pla_l | LILMATTMRGTAATAGGVLLLALLVLSTTQVARAEDPYLFFEWHVTYGTRTLLGVPQ |
| | | | KVILINDEFPGPRINCSSNNNIVVNVFNQLEEPLLFTWNGIQHRKNSWQDGLPGT |
| | | | NCPVAPGTNYTYKWQPKDQIGSFFYFPSIGMQRAVGGYGLISVVSRLLIPVPFDPP |
| | | | ADDHVVLIGDWYTKDHEVMARLLDSGRS |
| 918 | 49_54 | Poa_p | RSPPILMATTMRATAAAAILLLALLLLSTTNVARAEDPYVFFEWHVTYGTKNLLGVP |
| | | | QKVILINGEFPGPRINCSSNNNIVVNVFNQLDQPLLFTWNGIQHRKNSWQDGLPG |
| | | | TNCPVAPGTNYTYKWQPKDQIGSFFYFPSIGMQRAVGGYGLISVVSRLLIPVPFDP |
| | | | PADDLQVLIGDWYTKDHAVMASLLDAGKSFGRPAGVLINGRGGKDATNPPMFTF |
| | | | EAGKTYRLRVCNVGIKASLNFRIQGHDMRLVEMDGSHTLQDSYDSLDVHVGHCL |
| | | | SVLVDADQKPADYLMVASTRFIVDASSVSAVIRYVGSNTPPAPNVPEPPAGWAWS |
| | | | LNQWRSFRWNLTASAARPNPQGSYHYGQINITRTIKLMITRGHLDGKLKYGFNGV |
| | | | SHVDADTPLKLAEYFNVSDQVFKYNQMGDSPPGVNGPMHITPNVITAEFRTFIEVV |
| | | | FENPEKSMDSLHLDGYAFFAVGMGPGKWKPELRKTYNLLDAVSRHSIQVYPRSW |
| | | | SAVMLTFDNAGMWNVRSNLWERHYLGEQLYISVISPARSLRDEYNFPENALRCGK |
| | | | VVGLPLPPSYLPA |
| 919 | 49_54 | Que_a | ELRKTYNLLDAVSRHTIQVYPRSWTAIMLTFDNAGMWNVRSNIWERHYLGEQVYV |
| | | | SVISPERSLRDEYNM |
| 920 | 49_54 | Que_a | TTQVARAEDPYLFFEWHVTYGTRTLLGVPQKVILINDEFPGPRINCSSNNNIVVNVF |
| | | | NQLEEPLLFTWNGIQHRKNSWQDGLPGTNCPVAPGTNYTFKWQAKDQIGSFFYF |
| | | | PSLGMQRAAGGYGMISVVSRLLIPVPFDPPADDFQVLVGDWYTKDHTVMASLLDA |
| | | | GKSPGRPAGVLINGKGGQDAASQPMFTFEAGKTYRLRVCNVGIKSSLNFRIQGHD |
| | | | MKLVEMEGSHTLQNTYDSLDVHVGQC |
| 921 | 51 | Amb_a | PTMDKEELVQRAKLAEQAERYDDMAQAMKQVTETGVELTNEERNLLSVAYKNVV |
| | | | GARRSSWRVISSIEQKTEGVERKQQMAREYRERVEKELREICYDVLGLLDKYLIPK |
| | | | ASNAESKVFYLKMKGDYYRYLAEVATGDQKTSVVEESQKAYQEAFDVSKGKMQP |
| | | | THPIRLGLALNFSVFYYEILNSPDRACQLAKQAFDDAIAELDTLNEDSYKDSTLIMQ |
| | | | LLRDNLTLWTSDTQGDGDEPQEGGD |
| 922 | 51 | Amb_a | AQDIANADLPPTHPIRLGLALNFSVFYYEILNSPDRACNLAKQAFDEAIAELDTLGE |
| | | | DSYKDSTLIMQLLRDNLTLWTSDMQEDGADEIKEASSKQ |
| 923 | 51 | Amb_p | MSNNDKDRETHVYMAKLSEQAERYEEMVECMKSVAKLNVELTVEERNLLSVGYK |
| | | | NVIGARRASWRIMSSIEQKEESKGNESNVTLIKGYCKKVEDELSKICSDILEIIDKH |
| | | | LIPSSGSGEATVFYHKMKGDYYRYLAEFKTDQERKDAAEQSLKGYEAAAAAANTEL |
| | | | PSTHPIRLGLALNFSVFYYEIMNSPERACHLAKQAFDEAIADLDSLSEESYKDSTLI |
| | | | MQLLRDNLTLWTSDLPEDAGDENQPKGEEPKPAE |
| 924 | 51 | Amb_p | DSKVFYLKMKGDYHRYLAEFKTGAERKEAAESTLNAYKAAQDIANAELAPTHPIRL |
| | | | GLALNFSVFYYEILN |
| 925 | 51 | Amb_p | VFYYEILNSPDRACNLAKQAFDEAISELDSLGEESYKDSTLIMQLLRDNLTLWTSDT |
| | | | NEDGGDEIKEAPAPK |
| 926 | 51 | Bet_v | MAVTPSAREENVYMAKLAEQAERYEEMVEFMEKVTAAVESEELSVEERNLLSVAYK |
| | | | NVIGARRASWRIISSIEQKEESRGNEDHVATIRDYRSKIETELSNICDGILKLLDTR |
| | | | LIPSASSGDSKVFYLKMKGDYHRYLAEFKTGADRKEAAESTLTAYKAAQDIANTEL |
| | | | APTHPIRLGLALNFSVFHYEILNSPDRACNLAKQAFDEAIAELDTLGEESYKDSTLI |
| | | | MQLLRDNLTLWSSDMQDDGADEIKEAP |
| 927 | 51 | Cyn_d | MSPSEPTREESVYMAKLAEQAERYEEMVEFMERVARSAGGAGGGEELSVEERNLL |
| | | | SVAYKNVIGARRASWRIISSIEQKEEGRGNEAHAASIRAYRSKIEAELARICDGILA |
| | | | LLDSHLVPSAGAAESKVFYLKMKGDYHRYLAEFKSGTERKEAAESTMNAYKAAQD |
| | | | IALADLAPTHPIRLGLALNFSVFYYEILNSPDRACNLAKQAFDEAISELDSLGEESYK |
| | | | DSTLIMQLLRDNLTLWTSDTNEDGGDEIKEAAAPKESGD |
| 928 | 51 | Que_a | MSPTDSSREENVYMAKLAEQAERYEEMVEFMEKVAKTVDVEELTVEERNLLSVAY |
| | | | KNVIGARRASWRIISSIEQKEESRGNEDHVVIIKEYRGKIENELSKICDGILGLLET |
| | | | HLIPSASAAESKVFYLKMKGDYHRYLAEFKTGAERKEAAESTLLAYKSAQDIALAEL |
| | | | PPTHPIRLGLALNFSVFYYEILNSPDRACNLAKQAFDEAISELDTLGEESYKDSTLIM |
| | | | QLLRDNLTLWTSDITDDAGDEIKEASKRESGE |
| 929 | 52 | Bet_v | ALGCDGSVLIDSTLSNTAEKDSPANNPSLRGFEVIDNAKAKLEAICKGVVSCADIV |
| | | | AFAARDSIEITGGLGYDVPAGRRDGIVSLASETLTNLPPPTFNVDQLTQLFANKGFT |
| | | | QEEMVTL |
| 930 | 52 | Bet_v | GCDASILIDSTNKKPSEKDASPNQTIRGYEVIDKAKKRLEVTCPSTSCADIITLAVR |
| | | | DAVALAGGPNY |
| 931 | 52 | Cyn_d | MDARMVFPLFLVAVAAAPLASGQLSPDFYKTTCPDAEKIIFGVVEKRFKEDPGTAA |
| | | | GLLRLVFHDCFANGCDASILIDPLSNQASEKEAGPNISVKGYDVIDDIKTELEKKCP |
| | | | EVVSCADIVAVSARDAVKLTGGPAYEVPTGRRDAVVSNREDADNLPGPDIAVPKLL |
| | | | SDFSKKGFDVEEAVALLAGGHTIGSCKCFFIEADAAPIDPEYKKNISAACDGANRD |
| | | | RGSVPLDQITPNVFDGNYFALALAKKMPLTVDRLMGMDPKTEPVLKAMAAKPESF |
| | | | VPIFAKAMEKISALQVLTGKDGEIRKSCGEFNNPKPTSDGPSVIRISSLNPDHMGL |
| | | | SGPGARKVGGRADGMKANGAED |
| 932 | 52 | Que_a | LSNQASEKEAGPNISVKGYDVIDDIKTELEKKCPEVVSCADIVAVSARDAVKLTGG |
| | | | PAYEVPTGRRDAVVSNR |
| 933 | 53 | Amb_p | ERIHDANLTLHVGVLKNEFMNFGFDYFADPMVEIATYYSLLFCDGLVTEFPATAAAY |
| | | | FRSPCSDTSKN |
| 934 | 53 | Amb_p | AFCLGSADLTTSTTAATTFMAKVVTVSEIQNKSGIFSFDLSWSEIQTLKPDLSGPYA |
| | | | QAGLKRNPAAKNAGKFLTLSEFLELAKSSNVSGIMIEIEDAPYLATRGLGVVDAISS |
| | | | AL |
| 935 | 53 | Ant_o | EITLTKSYGDIAKDLSIIKPFASGIMVPKHFIQPLNKEDYLLPYTTLVKDARALGLEVF |
| | | | AAGFNNDMLTSYNYSYDPAAEYLQFIDNPDFSVDGVLTDFTPTASGAVACLAHTK |
| | | | GNALLPTAKALLPTENGERPLIITHNGASGVFPGCTDLAYQQAVRDGADIIDCAVR |
| | | | MTKDGVAFCLGSADLTTSTTAATTFMTKVVTVSEIQNRSGIFSFDLSWSEIQTLKP |
| | | | DLSGPYAQAGLKRNPAAKNAGKFLTLSEFLELAKSSNVSGIMIEIEDAPYLATRGLG |
| | | | VVDAVSSALVNASYDKESNHQRVLIQSDDSSVLSVFKKFPKFERILVIEPIISDASK |
| | | | PSIDEIKEFAHTVMVSRGSLVQVNGFFLTAFSDLAERIHDANLTLHVGVLKNEFMN |
| | | | FGFDYFADPMVEIATYYSLLFCDGLVTEFPATAAAYFRSPCSDTSKNLSYTILAANP |
| | | | GALEQMVPLGALPPALPPAPVLEPADVIDPPLPPVAVSSPPESTPNGDDQPSGASS |
| | | | NAGNCRLLVAGIAAAFLYLMSSH |
| 936 | 53 | Ant_o | IFTKRTAVCSSRMGSRYPLLFLILLLVHGANALPPVPEWLTLTGRRPLVIARGGFSG |
| | | | VFPDSSNLAFSNAVTYSLPDVVLFCDLQFSSDGVGFCLSNLNLDNSTLISKNEGFA |
| | | | SRGSTYQVNGQDIQGWFSLDFKAEELHNIPLIQNTLSRSQIFDGVPYLLSLDNVVK |
| | | | TVQPHEIWINVQYDSFLREHGLSSEDYILGLPKEFPVTWVSSPEVALLKSLSGKLR |
| | | | NNTKLIFRFLSEDLVEPTTKKTYGELLKDLKSITTFASGILVPKQFIWPMNKDMYLD |
| | | | PATSLVEDAHAIGLEVYASGFANDDSCISHNYSYDPSKEYLQFIDNSDFSVDGVLT |
| | | | DYPPTASAAVACLAHTKGNALAPPGTDTPGGGRPLIITHNGASGVFSDSTDLAYQ |
| | | | QAVKDGADIIDCWVRMTKDGVAFCLGSLDLNSSTTAATSFLGKMTTVNEIQNKS |
| | | | GIFSFDLTWNEIQTLKPNLIGPFSEASLDRNPAAKNAGKFMTLAGFLDYAKASNIS |
| | | | GILIGIEHAAFLETRGHDVVATVSNALIKSGYDKETKKCVLIQSEDPPVLSAFKKFP |
| | | | KFKRVFEIEFDIGDVSQPSVVQILEFANAVKLRRSSAARVDGFFLTGFTDALVDRLH |
| | | | AANIAVYVGVLKNEYMSLAFDYWADPMVEIATDTWAVGADGLVTEFPATAAAYFR |
| | | | SPCSDTSKNLSYTILAANPGALEQMVPLGALPPALPPAPVLEPADVIDPPLPPVAVS |
| | | | SPPESTPNGDDQPSGASSNAGNCRLLVAGIAAAFLYLMSSH |
| 937 | 53 | Cyn_d | LKNEFMNFGFDYFADPMVEIATYYSLLFCDGLVTEFPATAAAYFRSPCSDTSKNLSY |
| | | | TILAANPGALEQMVPLGALPPALPPAPVLEPADVIDPPLPPVAVSSPPESTPNGDDQ |
| | | | PSGASSNAGNCRLLVAGIAAAFLYLMSSH |
| 938 | 53 | Cyn_d | PRWGRRKAFPSFVLGVSCEGAPPDQMGASNPHMFLILLLLLHGASAAPNAPLPKW |
| | | | RTLSGRPPLVIAHGGFSGLFPDSSQFAYQFAMSTSLPDVALFCDLQFSSDGMGFC |
| | | | KSGLTLDNSTIISEVFPKMEKTYKVNGEDVRGWFSLDFTADQLVQNVTLIQNIFSR |
| | | | PSTFDGALGMYMVDDVVELRPPHIWLNVEYHSFFLEHKISTEDYLKALPKEFSFSYI |
| | | | SSPEVAFLKSVGGLLKQSKTKFVFRLLNENVVEPSTKKTYGELAKDLKFIKEFASGI |
| | | | LVPKTYIWPLNKDQYLAPSTSLVKDAHALGLEVYASGFANDVGLSYNYSYDPSAEY |
| | | | LQFIDNPDFAVDGLLTDFPPTASGAVACLAHSKGNPLPPPQRPRPLIISHNGASGVF |
| | | | PGSTDLAYQQAMKDGTDIIDCTVQMSKDGVAFCMPSADLGSCTTAGISFINKGST |
| | | | VHEIQNKSGIFSFDLSWSEIQTLKPDLVGPFAQAGLKRNPVAKNAGKFMTLPGFLD |
| | | | MAKASNVSGILINIEHAAYLATKGLGVVDAVTGALTKAGYDKETKQQVLIQSEDSS |
| | | | VLSAFKKSFPASKRVLSIDTEISDVAKPSVDDIKGVADGVRIHRSSVAQVTGYFLT |
| | | | HFTHVVDTLHAANLTVFIGVLKNEFMNLGFDYFADPMVEIVTYSDAVMADGLITEF |
| | | | PATAAAYFKSPCSDMNLNLSYSILPAQPGALVNIAVPGALPPVGAPAPLLEPADVLD |
| | | | PPLPPVRAVSTAAAPAPTGAADNTTSAASTTAGNRSSSLLVAGIVALLSLSFLQ |
| 939 | 53 | Fra_e | DLAYRQAMKDGADIIDCTVQMSKDGVAFCMPSADLGSCTTAGISFINKGSTVHEI |
| | | | QNKSGIFSFDLSWSEIQTLKPDLVGPFAQAGLKRNPVAKNAGKFMTLPGFLDMAK |
| | | | ASNVSGILINIEHAAYLATKGLGVVDAVTGALTKAGYDKETKQQVLIQSEDSSVLS |
| | | | AFKKSFPASKRVLSIDTEISDVAKPSVDDIKGVADGVRIHRSSV |
| 940 | 53 | Fra_e | NAGKLLTLPQFLDLAKTSNVSGILIDIEDAPYLATRGLGVVDAVSSALVNASYDKES |
| | | | NQQKVYIQSDDSSVLSVFKKFPRFQRVLVIDPVISDASKPSIDEIKEFADIVMVSR |
| | | | GSLVRVNGFFLTGYNDLVEKIHNANLTLHVGVLKNEFMNFGFDYFADPMVEIATYS |
| | | | SALVADGIVTEFPATAAAYFKSPCSDPSKNVSYTINAAQPGA |
| 941 | 53 | Fra_e | FFLTAFSDLAERIHDANLTLHVGVLKNEFMNFGFDYFADPMVEIATYYSLLFCDGLV |
| | | | TEFPATAAAYFRSPCSDTSKNLSYTILAANPGALEQMVPLGALPPALPPAPVLEPAD |
| | | | VIDPPLPPVAVSSPPESTPNGDDQPSGASSNAGNCRLLVAGIAAAFLYLMSSH |
| 942 | 53 | Lol_p | LVKDAHALGLEVYASGFANDDACMSHNYSYDPNAEYLNFIDNSDFSVDGFLTDYP |
| | | | PTASGAIACLAHTKGNALASIGNETTDGSRPLIITHDGASGVFPGSTDLAYQQAVK |
| | | | DGADIIDCWVRMSKDGVAFCLGSSDLNGSTTAATTFLGKMTNVDEIQNKSGIFSF |
| | | | DLSWNEIQTLKPNLIGPFSESAMDRNPAAKNAGKFMTLAAFLDYAKASNISGILIGI |
| | | | EGAAYLATRGL |
| 943 | 53 | Lol_p | YLATRGLDVVGAVSTALTKFGYDKETKQVVLIQSEDPPVLSAFKKFPKFKRVYEIEF |
| | | | DITDISKPSVVEISEMANAVKLRRSSAVQVDGFYLTGFTHALVDRLHAAKIEVYVG |
| | | | VLKNEFMSLAFDYWADPMKEIATDTWAVPADGLITDFPATAAAYFRSPCSDMEQN |
| | | | MSYYTISPAEVGTLVRMASYGLPPAPPPAPVLEPEDVHHQPLPLCPKEPMFRTFRCR |
| | | | MPPKGEYTMATDG |
| 944 | 53 | Lol_p | QFIDNPDFAVDGLLTDFPPTASGAVACLAHSKGNPLPPPQRPRPLIISHNGASGVFP |
| | | | GSTDLAYQQAMKDGTDIIDCTVQMSKDGVAFCMPSADLGSCTTAGTSFINKGST |
| | | | VHEIQNKSGIFSFDLSWSEIQTLKPDLVGPFAQAGLKRNPVAKNAGKFMTLPGFLD |
| | | | MAKASNVSGILINIEHAAYLATKGLGVVDAVTGALTKAGYDKETKQQVLIQSEDSS |
| | | | VLSAFKKSFPASKRVLSIDTEISDVAKPSVDDIKGVADGVRIHRSSVAQVTGYFLT |
| | | | HFTHVVDTLHAANLTVFIGVLKNEFMNLGFDYFAD |
| 945 | 53 | Lol_p | MGGRYPHMLLILILLHAANAALDEPVDKWKTLGGTPPLVIARGGFSGLFPESSPAA |
| | | | YQFAISTALPGVILHCDLQLSSDAKGFCRSGVRLDKSTLIEDIYPNRDKTYKIGPED |
| | | | VHAWFSVDFTEAELLNVTVKQTIYSRPSTFDGVMPMYRLEDVASLEPDGIWVNVE |
| | | | YNSFYKEHKISTEDFLLALPKEFPITYISSPDISFLKSIGGKLKGNTKLILRSLWENAT |
| | | | EPTLLKSYGDIMKDLSIIKPFASGILVPRHFIWPTNKDEYLLPSTSLVKDAHALGLEV |
| | | | YAAGFANDIFTSYNYSYDPAAEYLQFIDNPDFSVDGVLTDFTPTASGAIACLAHTKG |
| | | | NALLPIAKPLLATENGERPLIITHNGASGVFSGCTDLAYQQAVRDGADILDCSVRM |
| | | | TKDGVAFCLGSADLTTSTTAATTFMAKVVTVSEIQNKSGIFSFDLSWSEIQTLKPE |
| | | | LNGPYAQAGLKRNPAAKNAGKFWSLSEFLDFAKTSNVSGVLIEIEDAPYLATRGLG |
| | | | VVDAISSALVNASYDKESHQQRVLIQSDDSSVLSVFKKFPKFERVFVIDPVISDAS |
| | | | KPSIDEIKEFAHTVMVSRGALVRAHGFFLTGFNDMLVGKIHDANLTLHVGVLKNEF |
| | | | MNIGFDYFADPMVEIVTYYMGLVCDGIVTEFPATAAAYFRSPCSDLTKNMSYSILAA |
| | | | NPGGLEKMVPLGALPPALPPAPVLEPADVIDPPLPPVAVSSPPESTPEGDEDASAAS |
| | | | SNAANCLLVAGIAAFLYLSSH |
| 946 | 53 | Ole_e | PPPQRPRPLIISHNGASGVFPGSTDLAYQQAMKDGTDIIDCTVQMSKDGVAFCMP |
| | | | SADLGSCTTAGISFINKGSTVHEIQNKSGIFSFDLSWSEIQTLKPDLVGPFAQAGL |
| | | | KRNPVAKNAGKFMTLPGFLDMAKASNVSGILINIEHAAYLATKGLGVVDAVTG |
| 947 | 53 | Ole_e | VGVLKNEFMNFGFDYFADPMVEIATYYSLLFCDGLVTEFPATAAAYFRSPCSDLTKN |
| | | | MSYSILAANPGGLEKMVPLGALPPAL |
| 948 | 53 | Ole_e | AQAGLKRNPAAKNAGKFWSLSEFLDFAKTSNVSGVLIEIEDAPYLATRGLGVVDAI |
| | | | SSALVNASYDKESHQQRVLIQSDDSSVLSVFKKFPKFERVFVIDP |
| 949 | 53 | Pla_l | PSVDDIKGVADGVRIHRSSVAQVTGYFLTHFTHVVDTLHAANLTVFIGVLKNEFMN |
| | | | LGFDYFADPMVEIVTYSDAVMA |
| 950 | 53 | Pla_l | VRAHGFFLTGFNDMLVGKIHDANLTLHVGVLKNEFMNIGFDYFADPMVEIVTYYM |
| | | | GLVCDGIVTEFPATAAAYFRSPCSDLTKNMSYSILAANPGGLEKMVPLGALPPALPP |
| | | | APVLEPADVIDPPLPPVAVSSPPESTPNGDDQPSGASSNAGNCRLLVAGIAAAFLYL |
| | | | MSSH |
| 951 | 53 | Poa_p | QFIDNPDFAVDGLLTDFPPTASGAVACLAHSKGNPLPPPQRPRPLIISHNGASGVFP |
| | | | GSTDLAYQQAMKDGTDIIDCTVQMSKDGVAFCMPSADLGSCTTAGISFINKGSTV |
| | | | HEIQNKSGIFSFDLSWSEIQTLKPDLVGPFAQAGLKRNPVAKNAGKFMTLPGFLD |
| | | | MAKASNVSGILINIEHAAYLATKGLGVVDAVTGALTKAGYDKETKQQVLIQSEDSS |
| | | | VLSAFKKSFPASKRVLSIDTEISDVAKPSVDDIKGVADGVRIHRSSVAQVTGYFLT |
| | | | HFTHVVDTLHAANLTVFIGVLKNEFMNLGFDYFAD |
| 952 | 53 | Poa_p | SEIQTLKPNLIGPFSASGLDRNPAAKNAGKFMTLAGFLDYAKASNITGILIGIEHSA |
| | | | YLATRGLDVVDAVSSALIKSAYDKETKQRVFIQSEDPPVLSAFKKIPKFMRVFEIEF |
| | | | DIRDVSQPSVVEISEFANAVKLRRSSATQADGYYLTGFTTALVQRLHAANILVYVG |
| | | | VLKNEFMSLAFDYWADPMVEIATDTWSVFADGLVTEFPATAAAYFRSPCSNMERN |
| | | | LSYTIRPASPGILLDLAAYGALPPAPPPAPVLEPADIHRQPLPLCPTEPMFRTFRCRLA |
| | | | PKATGKSAEYTANLASDG |
| 953 | 53 | Poa_p | SEIQTLKPNLIGPFSASGLDRNPAAKNAGKFMTLAGFLDYAKASNITGILIGIEHSA |
| | | | YLATRGLDVVDAVSSALIKSAYDKETKQRVFIQSEDPPVLSAFKNIPKSNRVFEIEF |
| | | | DIGDVSQPSVVEITKFANVVKLRRSSAAKVDGFYLTGFTDAVKRLKDAKIEVHVGV |
| | | | LKNEFMSLAFDYWADPMVEIATDTWSVFADGLVTEFPATAAAYFRSPCSDMT |
| 954 | 53 | Poa_p | SEIQTLKPNLIGPFSASGLDRNPAAKNAGKFMTLAGFLDYAKASNITGILIGIEHSA |
| | | | YLATRGLDVVDAVSSALIKSAYDKETKQRVFIQSEDPPVLSAFKKIPKFMRVFEIEF |
| | | | DIRDVSQPSVVEISEFANAVKLRRSSATQADGYYLTGFTTALVQRLHAANILVYVG |
| | | | VLKNEFMSLAFDYWADPMVEIATDTWSVFADGLVTEFPATAAAYFRSPCSNMERN |
| | | | LSYTIRPASPGILLDLAAYGALPPAPPPAPVLEPTDVHRQPLPLCPTEPIFRTFRCRLP |
| | | | PKETGKNPEYTGSLAANG |
| 955 | 53 | Que_a | VADGVRIHRSSVAQVTGYFLTHFTHVVDTLHAANLTVFIGVLKNEFMNLGFDYFAD |
| | | | PMVEIVTYSDAVMADGLITEFPATAAAYFKSPCSDMNLNLSYSILPAQPGALVNIAV |
| | | | PGALPPVG |
| 956 | 53 | Que_a | KNEFMNIGFDYFADPMVEIVTYYMGLVCDGIVTEFPATAAAYFRSPCSDTSKNLSY |
| | | | TILAANPGALEQMVPLGALPPALPPAPVLEPADVIDPPLPPVAVSSPPESTPNGDDQ |
| | | | PSGASSNAGNCRLLVAGIAAAFLYLMSSH |
| 957 | 53 | Que_a | TAKALLPTENGERPLIITHNGASGVFPGCTDLAYQQAVRDGADIIDCAVRMTKDGV |
| | | | AFCLGSADLTTSTTAATTFMAKVVTVSEIQNKSGIFSFDLSWSEIQTLKPDLNGPY |
| | | | AQAGLKRNPAAKNAGKFWSLSEFLDFAKTSNVSGVLIEIEDAPYLATRGLGVVDAI |
| | | | SSALVNASYDKESHQQRVLIQSDDSSVLSVFKKFPKFERILVIEPIISDASKPSIDEI |
| | | | KEFADIVM |
| 958 | 53 | Que_a | IQTLKPDLVGPFAQAGLKRNPVAKNAGKFMTLPGFLDMAKASNVSGILINIEHAAY |
| | | | LATKGLGVVDAVTGALTKAGYDKETKQQVLIQSEDSSVL |
| 959 | 56 | Amb_a | ELLEFPNKDNRRLLHAVYRVGDLDRSIKFYTEAFGMKLLRKRDVPEEKYSNAFLGF |
| | | | GPEDSNFAVELTYNYGVDKYDIGTGFGHFAIATADVYKLAQDIKAKGGTITREAGP |
| | | | VKGGTSVIAFAKDPDGYLFELIERPNTPEPLCQVMLRVGDLDRSIKFYEKALGMKLC |
| | | | RKIDRPEQKYTLAMMGYAEEKETTVLELTYNYGVTEYTKGNAYAQVAVSTSDVYKS |
| | | | AQVVNHVIQELGGKITRQAGPLPGLGTKIVSFLDPDGWKTVLVDHEDFLKELHN |
| 960 | 56 | Amb_p | MAETLSAELLEFPNKDNRRLLHAVYRVGDLDRSIKFYTEAFGMKLLRKRDVPEEKY |
| | | | SNAFLGFGPEDSNFAVELTYNYGVDKYDIGTGFGHFAIATADVYKLAQDIKAKGGT |
| | | | ITREAGPVKGGTSVIAFAKDPDGYLFELIERPNTPEPLCQVMLRVGDLDRSIKFYEK |
| | | | ALGMKLCRKIDRPEQKYTLAMMGYAEEKETTVLELTYNYGVTEYTKGNAYAQVAVS |
| | | | TSDVYKSAQVVNHVIQELGGKITRQAGPLPGLGTKIVSFLDPDGWKTVLVDHEDF |
| | | | LKELH |
| 961 | 56 | Amb_p | CQVMLRVGDLDRSIAFHEKAFGMELLRRKDNPDYKYTIAMMGYGPEDKNAVLELT |
| | | | YNYGVTEYDKGNAYAQIAIGTDDVYKTAEAIKVFGGKITREPGPLPGISTKITACLD |
| | | | PDGWKTVFVDNVDFLKELE |
| 962 | 56 | Bet_v | MVRILPMASTIRPSLSSLKLPLLRFALSPHSPSRRLSMMHLGSAVPQSQFFGLKAVK |
| | | | LLRGEGNSMVVAAAGNAAQASTAATQENVLEWVKKDKRRMLHVVYRVGDLDRTI |
| | | | KFYTECLGMKLLRKRDIPEERYTNAFLGYGPEDSHFVIELTYNYGVDKYDIGTAFGH |
| | | | FGIAVEDVAKTVELIKAKGGKVTREPGPVKGGTTVIAFIEDFDGYKFELLERGPTPE |
| | | | PLCQVMLRVGDLDRSINFYEKAFGMELLRKRDNPEYKYTIAMMGYGPEDKSAVLEL |
| | | | TYNYGVTEYEKGNAYAQIAIGTDDVYKTAEAIKLSGGKITREPGPLPGISTKITACL |
| | | | DPDGWKAVFVDNVDFLKELE |
| 963 | 56 | Bet_v | MAEAAHVAPNAELLEWPKKDKRRFLHVVYRVGDLDRTIKFYTESFGMKLLRKRDIP |
| | | | EEKYSNAFLGFGPEQSNFVVELTYNYGVPSYDIGTGFGHFAISTPDVYKLVEDIRAG |
| | | | GGNVTREPGPVKGGQSVIAFVKDPDGYTFELIQRGPTPEPLCQVMLRVGDLDRAIK |
| | | | FYEKALGMRLLKKVDRPEYKYTIAMLGYAEEHETTVLELTYNYGVTEYTKGNAYAQI |
| | | | AIGTDDVYKSGEVVNLVIQELGGKITRQPGPIPGLNTKITSFLDPDGWKTVLVDNE |
| | | | DFLKELE |
| 964 | 56 | Cyn_d | GVTEYSKGNAYAQVAIGTNDVYKSAEAVDLATKELGGKILRQPGPLPGINTKIASF |
| | | | VDPDGWKVVLVDHADFLKELQ |
| 965 | 56 | Cyn_d | MRAFPATAGRGAVACAAAAPVPRRSLLLSTAAAGATLHSDSLRLATRSASGAGAIG |
| | | | ASADAAKAATFAGKDEAVAWAKSDNRRLLHVVYRVGDLDRTIKFYTECLGMKLLR |
| | | | KRDIPEDKYSNAFLGYGPEDSHFVVELTYNYGVDKYDIGEGFGHFGIAVDDVAKTV |
| | | | EFIRAKGGKVTREPGPVKGGKTVIAFVEDPDGYKFEILERPGTPEPLCQVMLRVGD |
| | | | LDRAISFYEKACGMELLRKRDNPEYKYTVAMLGYGPEDKNAVLELTYNYGVTEYAK |
| | | | GNAYGQIAIGTDDVYKTAEVAKLFGGQVVREPGPLPGINTKITSILDPDGWKSVFV |
| | | | DNIDFAKELE |
| 966 | 56 | Cyn_d | EPGPVKGGKSVIAFVEDPDGYKFELIERGPTPEPLCQVMLRVGDLDRAINFYEKAF |
| | | | GMELLRKRDNPQYKYTIAMMGYGPEDKNAVLELTYNYGVTEYDKGNAYAQIAIST |
| | | | DDVYKTAEVVRLNAGHITREPGPLPGINTKITACTDPDGWKTVFVDNIDFLKELEE |
| 967 | 56 | Cyn_d | MARLLLPLPFAAAAAASSSLHLAASRLRVPSVSVTRREGLFGGRLAGVSVPARLAR |
| | | | RGLSAGAEAGGGSAAQVVGPEEAMEWVKKDRRRLLHVVYRVGDLDKTIKFYTEC |
| | | | LGMKLLRKRDIPEERYTNAFLGYGPEDSHFVVELTYNYGVESYNIGTGFGHFGIAVE |
| | | | DVAKTVDLIKAKGGTVTREPGPVKGGKSVIAFVEDPDGYKFELIERGPTPEPLCQV |
| | | | MLRVGDLDRAINFYEKAFGMELLRKQDNPQYKKEYVLLTYY |
| 968 | 56 | Cyn_d | MATGSEAVLEWNKQDKKRMLHAVYRVGDLDRTIKCYTECFGMKLLRKRDVPDEK |
| | | | YTNAFLGFGPEDKNFALEL |
| 969 | 56 | Cyn_d | ELTYNYGVDKYEIGEGFGHFAIATEDISKLAEAVKSSCCCKITREPGPVKGGSTVIA |
| | | | FAQDPDGYMFELIQ RGPTPEPLCQVMLRVGDLERSIKFYEKALGMRLLRKKDVPEY |
| | | | KYTIAMLGYDDEDKTTVL |
| 970 | 56 | Que_a | SSYDIGTGFGHFAIATPDVYKLVEDIRAKGGVVTREPGPVKGGQSVIAFVKDPDGY |
| | | | VFELIQRGPTPEPLCQVMLRVGDLDRSIKFYEQALGMRVVKKVDRPEYKYTLAMLG |
| | | | YAEEHETTVLELTYNYGVTEYTKGNAYAQIAIGTDDVYKSAEVVNLVTQELGGKITR |
| | | | QPGPIPGLNTKITSFLDPDGWKTVLVDNEDFLKELHKE |
| 971 | 56 | Que_a | MAEAHAAPNAELLEWPKKDKRRFLHVVYRVGDLDRTIKFYTECFGMKLLRKRDIPE |
| | | | EKYSNAFLGFGSEETNFVVELTYNYGVTEYTKGNAYAQIAIGTDDVYKSAEVVNLV |
| | | | TQELGGKITRQPGPIPGLNTKITSFLDPDGWKTVLVDNEDFLKELH |
| 972 | 56 | Que_a | EDVAKTVELVKAKGGKVTREPGPVKGGSTVIAFVEDPDGYKFELLERGPTPEPLCQ |
| | | | VMLRVGDLDRSINFYEKAFGLELLRKRDNPEYKYTIAMMGYGPEDKNVVLELTYNY |
| | | | GVTEYDKGNAYAQIAIGTDDVYKTAEAIKLSGGKITREPGPLPGINTKITACLDPDG |
| | | | WKTVFVDNVDFIKELE |
| 973 | 56 | Que_a | MGVAAAGNAAQASTTATQENVLEWVKKDKRRMLHVVYRVGDLDRTIKFYTECLG |
| | | | MKLLRKRDIPEERYTNAFLGYGPEDSHFVIELTYNYGVDKYDIGTGFGHFGIAVEDV |
| | | | AKTV |
| 974 | 62 | Amb_a | RAERIVAEVVQAKQMMNPTTAAGVLRVFFHDCFVSGCDASVLIASTQFQKSEHDA |
| | | | EINHSLPGDAFDAVVRAKLALELECPGVVSCADILALASGVLVTMTGGPRYPIPLGR |
| | | | KDSLSSSPKDPDVELPHSNFTVDRLIQMFGAKGFTVQELVALSGAHTLGFSHCKEF |
| | | | ADRLYNFRSKGGKPEPFDPSMNPSYARGLKDVCKDYLKDPTIAAFNDIMTPGKFD |
| | | | NMYFVNLERGLGLLSTDEELWTDPRTKPLVQLYASNPTAFFTDFGKAMEKLSLFGV |
| | | | KTGKDGEVRRRCDAYN |
| 975 | 62 | Amb_p | AERDADINLSLPGDAFDIVTRIKTALELECPGVVSCSDILAIAARNLIKMTGGPKID |
| | | | VLFGRKDGLVSQASRVKGNLALPNMTMTHIINMFKLKGFTVQEMVALVGAHTIGF |
| | | | SHCKEFSSRIFSYSKTQPVDPKMNPKYADGLKRLCANYTKDHTMAAFNDVITPGK |
| | | | FDNMYYKNLQRGLGLLATDQAMADDPRTKPIVDLYAENEDAFFNDFAKAMQKVS |
| | | | MLDIKTDKNGEVRHRCDTFN |
| 976 | 62 | Amb_p | HGIAERDADINLSLPGDAFDIVTRIKTALELECPGVVSCSDILAIAARNLIKMTGGP |
| | | | KIDVLFGRKDGLVSQASRVKGNLALPNMTMTHIINMFKLKGFTVQEMVALVGAHT |
| | | | IGFSHCKEFSSRIFSYSKTQPVDPKMNPKYADGLKRLCANYTKDHTMAAFNDVITP |
| | | | GKFDNMYYKNLQRGLGLLATDQAMADDPRTKPIVDLYAENEDAFFNDFAKAMQK |
| | | | VSMLDIKTDKNGEVRHRCDTFNQQSGT |
| 977 | 62 | Ant_o | PGHSFPPFAPLHRLHENIVSNSPTLPSPSHFLDSHAPRRSSRRLLATSLQLGGTYRI |
| | | | NPRASHTHAGSTYQAAAMRRQSLLLLLAAATLLAATVSAQPGPTQPGPAQPVPTLP |
| | | | GPGPVPTLSPDFYSQTCPRAERIIAEVVQSKQMANPTTAAGVLRVFFHDCFVTGCD |
| | | | ASVLIAPTRFAKSEKDAEINHSLPGDAFDAVVRAKLALELECPGVVSCADILALASR |
| | | | VLVTMTGGPRYPIPLGRKDSLSSSPTAPDVELPHGNFTVGKIIELFLAKGFSIQEMV |
| | | | ALSGAHTLGFSHCQEFASRLYNYRDNGGKPAPFDPSMNPTYAKGLQAACQDYQK |
| | | | DPTIAAFNDIMTPGKFDNMYYINLQRGLGLLSTDEELWSDLRTKPFVQRYAANNTD |
| | | | FFEDFSKAMEKLSLYGVKTGAEGEIRRRCDAYNSGPITV |
| 978 | 62 | Bet_v | MAFPLLFILFLSIPFSEADLLSIDYYKKTCPDFDRIIRETVTSKQITNPTTAAGTLRAF |
| | | | FHDCVVNGCDASVLISSNSFNKAERDADLNLSLSGDAFDLIVRAKTALELACPNIV |
| | | | SCSDILAQATRDLITMVGGPYYKVILGRKDGLVSQASRVEGNIPRVNMSMNQIIK |
| | | | MFASKGFTVQEMVALTGSHTIGFSHCKEFADRIFNHSKTVPTDPETYPKFADALKK |
| | | | NCANYTKDPAMSAFNDVMTPGKFDNMYFQNLQRGLGLLASDHALIKNSRTKPIVD |
| | | | LFASNQTAFFEDFSQAMEKLGVYGIKTGQMGEVRHRCDAFN |
| 979 | 62 | Bet_v | ILISSTAFNSAERDADINHSLPGDAFDVVVRAKTALELACPNTVSCADILALATRDL |
| | | | VTMVGGPYYNVFLGRKDGLVSKSSYVEGKLPRPTMSISQIIELFASNGFSIQETVAL |
| | | | SGAHTIGFSHCKEFSSGIYNYSKYSQYDTQYNPRFAQALQKACADYQKNPTLSVF |
| | | | NDIMTPNKFDNMYFQNLPKGLGLLSSDHGLNSDPRTKPFVETYAADQNKFFEAFG |
| | | | KAMEKLSLYKVKTGRQGEIRHRCDEFN |
| 980 | 62 | Bet_v | CPGVVSCSDILAMAARDAVFWAGGPIYDIPKGRKDGRRSKIEDTINLPPPTFNASQ |
| | | | LIYMFGQHGFSAQEMVALSGAHTLG |
| 981 | 62 | Bet_v | ILISSTAFNSAERDADINHSLPGDAFDVVVRAKTALELACPNTVSCADILALATRDL |
| | | | VTMVGGPYYNVFLGRKDGLVSKSSYVEGKLPRPTMSISQIIELFASNGFSIQETVAL |
| | | | SGAHTIGFSHCKEFSSGIYNYSKYSQYDTQYNPRFAQALQKACADYQKNPTLSVF |
| | | | NDIMTPNKFDNMYFQNLPKGLGLLSSDHGLNSDPRTKPFVETYAADQNKFFEAFG |
| | | | KAMEKLSLYKVKTGRQGEIRHRCDEFN |
| 982 | 62 | Bet_v | MCPGVVSCSDILAMAARDAVFWAGGPIYDIPKGRKDGRRSKIEDTINLPPPTFNAS |
| | | | QLIYMFGQHGFSAQEMVALSGAHTLGV |
| 983 | 62 | Cyn_d | RHSIPSVGSRSSIALPPRTAIPSPRRISWTLTRAPRLQEGTHQEHYRISAMRLSLLL |
| | | | VLVAAFSAGAASQPLPPAGGKPLLTPDYYKQTCPRAERIIAEVIQSKQMANPTTAA |
| | | | GVLRVFFHDCFVGGCDASVLIASNQFAKSEHDADINQSLPGDAFDAVVRAKLALE |
| | | | MECPGVVSCADILSLASGVLVTMTGGPRYPVPLGRKDSLSSSPTAADADLPHSNF |
| | | | TVDRLIQMFGAKGFSVQELVALSGAHTLGFSHCKEFADRIFNYRDKAGKPEPFDPT |
| | | | MNPALAKGLQGACKDYLKDPTIAAFNDIMTPGKFDNMYFINLERGLGLLSTDEELW |
| | | | TDARTKPFVQLYASNSTKFFEDFGRAMEKLSLFGVKTGADGEIRRRCDTYNHGPM |
| | | | PK |
| 984 | 62 | Cyn_d | FSAGAASQPLPPAGGKPLLTPDYYKQTCPRAERIIAEVIQSKQMANPTTAAGVLRVF |
| | | | FHDCFVGGCDASVLIASNQFAKSEHDADINQSLPGDAFDAVVRAKLALEMECPGV |
| | | | VSCADILSLASGVLVTMTGGPRYPVPLGRKDSLSSSPTAADADLPHSNFTVDRLIQ |
| | | | MFGAKGFSVQELVALSGAHTLGFSHCKEFADRIFNYRDKAGKPEPFDPTMNPALA |
| | | | KGLQGACKDYLKDPTIAAFNDIMTPGKFDNMYFINLERGLGLLSTDEELWTDARTK |
| | | | PFVQLYASNSTKFFEDFGRAMEKLSLFGVKTGADGEIRRRCDTYN |
| 985 | 62 | Fra_e | RGFSVQEMVALSGAQTIRFFHCKEFSSILYNYSQTLESAPSYKRVMIYECIQLNAIK |
| | | | YKKVMIYECIQKPN |
| 986 | 62 | Lol_p | EHSRPLRSRHSLPSTSSEKHPLQVPRRPLSLAFLGPPRTSPALTSPAKLEGIKLTQR |
| | | | ATRAQDPRTKQQLAAMRRMSLLLLAAAAVLAAAVVAVHAGPPPPVKLSPDFYSQT |
| | | | CPRAERIIAEVVQSKQMANPTTAAGVLRVFFHDCFVSGCDASVLIAPTHYAKSEKD |
| | | | ADINHSLPGDAFDAVVRSKLALELECPGVVSCADILALASRVLITMTGGPRYPVPLG |
| | | | RKDSLSSNPAAPDVELPHSNFTVGRIIELFLAKGFTVQEMVALSGAHTLGFSHCQE |
| | | | FASRIYNYRDKGGKPAPFDPSMNPTYAKGLQAACQNYQKDPTIAAFNDIMTPGKF |
| | | | DNMYYVNIQRGLGLLSTDEDMWSDMRTKPFVQRYAANNADFFDDFSKAMEKLS |
| | | | MYGVKTGADGEIRRRCDAFNSGPITQ |
| 987 | 62 | Ole_e | PTYAKGLQAACQNYQKDPTIAAFNDIMTPGKFDNMYYVNIQRGLGLLSTDEDMWS |
| | | | DMRTKPFVQRYAANN |
| 988 | 62 | Pla_l | SSTAGEPLLLLGLIGPRTRPIFPVIIKNVGRKRLANVGAVASTSPLPRRQLLFMATTS |
| | | | FLLPFPNSASAVDEIDLIKEEIGKVITKIKAAGLLRLVFHDAGTFDQGDEAGGMNGS |
| | | | IVYELDRPENTGLAKSIKVLEKAKIQVGAVRPVSWADLIAVAGAEAVSICGGPNIPV |
| | | | KLGRIDAIVPDPEGRLPEESFAATAMKDNFQKKGFTTQELVALSGAHTLGGKGFGK |
| | | | PTVFDNSYYKILLDRPWSAGGMSSMIGLPSDRALVEDDECIRWISKYADDQVLFF |
| | | | EDFKNAYVKLVNTGAKWKR |
| 989 | 62 | Poa_p | PKSHTRVGSTYQPAAMRRLSLLLLAAAALLAAAVSAAPGPAPKLSPDFYSQTCPRA |
| | | | ERIIAEVVQSKQMANPTTAAGVLRVFFHDCFVSGCDASVLIAPTHYAKSEKDADIN |
| | | | HSLPGDAFDAVVRSKLALELECPGVVSCADILALASRVLVTMTGGPRYPVPLGRKD |
| | | | SLSSNPTAPDVELPHSNFTVGRIIELFVAKGFTVQEMVALSGAHTLGFSHCQEFAS |
| | | | RIYNYRDKGGKPAPFDPSMNPTYAKGLQAACQDYQKDPTIAAFNDIMTPGKFDNM |
| | | | YYVNIQRGLGLLSTDEDMWSDMRTKPFVQRYAANNTDFFDDFSKAMEKLSMYGV |
| | | | KTGADGEIRRRCDAFNSGPTTQ |
| 990 | 62 | Que_a | DFPFSLSLIFHTSFVLATLLLRFKSILIRSLSLVKMVIGKILGLILLMEMIVHGFRFEVV |
| | | | DGFRFDVVNGFRFGVVDGLSMEYYLLRCPLAELIVKIKVIKALQADPTLAASLVRLH |
| | | | FHDCFIEGCDGSVLLNSTKQNKAERDSPANLSLRGFELIDEIKEELEKQCPGIVSCA |
| | | | DILAMAARDAVCKAGGPLYDIPKGRMDGTRSKIEDTINLPAPTFNASQLINLFGQH |
| | | | GFSAQEMVALSGAHTLGVARCSSFKNRLVGGLDANLNADFAKTLFTTCSASDTAE |
| | | | QPFDETRNTFDNLYYRALQCKSGVLDSDQTLYASAETKGIVDSYASNKVMFFSDF |
| | | | KRAMVKMSMLNVKQGSQGEVRQNCYKIN |
| 991 | 62 | Que_a | KLSVDYYTKTCPDFDSIMRETVTSKQINSPTTAAGTLRLFFHDCMVDGCDASVLIS |
| | | | TNPFNKAERDADINLSLPGDAFDLVVRAKTALELSCPGIVSCADILAQATRDLITMV |
| | | | GGPFYKIRLGRKDGFESKAELVNGQVPQPNMSVNQLIKVFAAKGFSAQEMVALTG |
| | | | AHTIGFSHCKEFSHRIFNYSKTSPSDPEMYPKYAEALRKTCSNYLKDPGMSAFNDI |
| | | | MTPSKFDNMYYQNLQRGLGLLATDHALSKHPRTKPFVDLYASNQTKFFEDFSHAM |
| | | | EKLSVFGIKTGRKGEVRHKCDAFN |
| 992 | 65 | Bet_v | MELDLSPKLAKKVYGDNGGAYHAWSPSELPMLREGNIGAAKLALEKHGFALPRYS |
| | | | DSAKVAYVLQGNGVAGIVLPESEEKVLAIKKGDAIALPFGVVTWWYNKEDTELVVL |
| | | | FLGDTSKAHKAGEFTDFFLTGSNGIFTGFSTEFVGRAWDLDEKVVKTLVGKQSGN |
| | | | GIVKLDGKFEMPEPKKEHREGMALNCEEAPLDVDIKKGGRVVVLNTKNLPLVGEV |
| | | | GLGADLVRLDGGAMCSPGFSCDSALQVTYVVRGSGRVQVVGVDGRRVLETTLKA |
| | | | GNLFIVPRFFVVSKIASPDGMEWFSIITTPNPIFTHLAGKTSVWKALSPEVLKAAFN |
| | | | VDPDTEKLFRSKRTSDAIFFPP |
| 993 | 65 | Cyn_d | AKVAYVLQGAGTCGIVLPEATKEKVVAVKEGDALALPFGVVTWWHNLPESATELV |
| | | | VLFLGDTSKGHKPGQFTNFQLTGATGIFTGFSTEFVGRAWD |
| 994 | 65 | Cyn_d | FVGRAWDLTEADAAKLVSSQPASGIIKLGAGQKLPAPSAEDREGMALNCLEAPLD |
| | | | VDIKNGGRVVVLNTVNLPLVKEVGLGADLVRIDAHSMCSPGFSCDSAYQVTYIVR |
| | | | GSGRVQVVGPDGKRVLETRVEGGYLFIVPRFHVVSKIADESGMEWFSIIT |
| 995 | 65 | Cyn_d | MVNRTATAEVMSMDLSPKKPAKAYGSDGGSYYDWSPADLPMLGVASIGAAKLHL |
| | | | AAGGLALPSYSDSAKVAYVLQGTGTCGVVLPEATKEKVIPVKEGDALALPFGVVTW |
| | | | WHNAHAAATDLVVLFLGDTSKGHKAGQFTNFQLTGASGIFTGFSTEFVGRAWDL |
| | | | DQDAAAKLVSTQPGSGIVMVKDGHKMPAPRDEDRAGMVLNCLEAPLDVDIKGGG |
| | | | RVVVLNTQNLPLVKEVGLGADLVRIDAHSMCSPGFSCDSAYQVTYIVRGSGRVQV |
| | | | VGIDGTRVLETRAEGGCLFIVPRFFVVSKIADETGMEWFSIITTPNPIFSHLAGKTS |
| | | | VWKAISPAVLETSFNTTPEMEKLFRSKRLDSEIFFAP |
| 996 | 65 | Que_a | KTMEVDLSPKLAKKVYGDNGGSYHAWSPSELPMLREGNIGAAKLALEKNGFALPC |
| | | | YSDSSKVAFVLQGNGVAGIVLPESEEKVLAIKKGDAIALPFGAVTWWYNKEDTELV |
| | | | VLFLGDTSKAHKAGEFTEFFLTGSNGIFSGFSTEFVSRAWDLDENVVKTLVGKQS |
| | | | GNGIVKLDENFEMPEPKKEHRFGMAFNCEEAPLDVDIKKGGRVVLLNTNVLPMLG |
| | | | EAGLGGDLVRLDGSAMCSPGYSCDSALQVTYIVRGSGRVQVVGVDGRRVLESTL |
| | | | KAGNLFIVPRFFVVSKIASPEGMDWFTVITSPKSPTFTQLAGRTSVWKALSPSVLQ |
| | | | ASFDVDADTEKLFRSKRTSEAIFFPP |
| 997 | 65 | Que_a | KNGGRVVVLNTKNLPLVGEVGLGADLVRLDGHAMCSPGFSCDSALQVTYIVRGS |
| | | | GRVQVVGVDGRRVLET |
| 998 | 73 | Amb_a | SQDEAGTAAIKAVELDAILGGRAVQHREPQNFESDKFISYFKPCIAPLEGGVKSGF |
| | | | KKPVEEEFETRLYTCRGKRVVHLKQVPFSRSMLNHDDVFILDTKDKIFQFNGANSN |
| | | | IQERAKALEVIQFLKDKYHEGTCNVAIVDDGKLQAEGDSGEFWVIFGGFAPIGKKV |
| | | | LSDDDIIPDRTAGKLYSIAGGKVADQIADYSKSSFESDKCYLMDCGSEVFVWVGR |
| | | | ATQVDDRKAASQAAEEFLTSNKRPKATLITRLIQGYETHSFKSNFDSWPSSTAPAA |
| | | | ENRGKVAENRGKVSALLKQQGGGPKGKEKNTPTVEEAVPPLLEANGKLEVWSIDG |
| | | | GAKHPVASEDIGKFYNGDCYIVLYSYHSREKKEDFYLCHWIGKDSTEEDQNTAAK |
| | | | LTTSMFNSMKGRPVQGRIYQEKEPPQFIALFQPMVLFKGGLSSSYKSYIAEKGLTD |
| | | | ETYSPDNAAIIRISGTAVHNNKAVHLDPVPASLNSHECFVVHAGSHLYIWQGTQST |
| | | | YEQQEWAAKIAEFLKPGKTAKYQKEGTESATFWLGLGGKEDVSTNKVSFDTIRDP |
| | | | HLFAFSLSKGKFEVEEVYNFDQDDLLPEDMLILDTHAEVFVWIGHAVDPKEKKNAL |
| | | | EYGQKYIAWAESLDGLSPRVPLYRVPDGNEPNFFTTYFSWEPAKTMIHGNAFEKKV |
| | | | TILFGGHDEGAGNQGGGNTQRAAAMAALNSTFNSPGGGGKASGATKGSNANSQ |
| | | | RRAAVAALSGVIPDAKIDEPDSPEKPEEAPEEPVEPSEPIPEDNDSEPKVAIEEDEN |
| | | | GILTSKSTFSYEQVRVKSEDPAPDIDLKRREAYLSVEEFESVLGMTREEFYKLPKWK |
| | | | QDLTKKKVDLF |
| 999 | 73 | Amb_p | AVQHREPQNFESDKFISYFKPCIAPLEGGVKSGFKKPVEEEFETRLYTCRGKRVVHL |
| | | | KQVPFSRSMLNHDDVFILDTKDKIFQFNGANSNIQERAKALEVIQFLKDKYHEGTC |
| | | | NVAIVDDGKLQAEGDSGEFWVIFGGFAPIGKKVLSDDDIIPDRTAGKLYSIAGGKV |
| | | | ADQIADYSKSSFESDKCYLMDCGSEVFVWVGRATQVDDRKAASQAAEEFLTSNK |
| | | | RPKATLITRLIQGYETHSFKSNFDSWPSSTAPAAENRGKVAENRGKVSALLKQQG |
| | | | GGPKGKEKNTPTVEEAVPPLLEANGKLEVWSIDGGAKHPVASEDIGKFYNGDCYI |
| | | | VLYSYHSREKKEDFYLCHWIGKDSTEEDQNTAAKLTTSMFNSMKGRPVQGRIYQE |
| | | | KEPPQFIALFQPMVLFKGGLSSSYKSYIAEKGLTDETYSPDNASIIRISGTAVHNNK |
| | | | AVHLDPVPASLNSHECFVVHAGSHLYIWQGTQSTYEQQEWAAKIAEFLKPGKTAK |
| | | | YQKEGTESATFWLGLGGKEDVSTNKVSFDTIRDPHLFAFSLSKGKFEVEEVYNFD |
| | | | QDDLLPEDMLILDTHAEVFVWIGHAVDPKEKKNALEYGQKYIAWAESLDGLSPRV |
| | | | PLYRVPDGNEPNFFTTYFSWEPSKTMIHGNAFEKKVTILFGGHDEGAGNQGGGNT |
| | | | QRAAAMAALNSTFNSPGSGGKASGATKGSNANSQRRAAVAALSGVIPDAKIDEP |
| | | | DSPEKPEEAPEEPVEPSEPIPEDNDSEPKVAIEEDENGILTSKSTFSYEQVRVKSED |
| | | | PVPDIDLKRREAYLSVEEFESVLGMTREEFYKLPKWKQDLTKKKVDLF |
| 1000 | 73 | Bet_v | MSSSTKLDPAFQGAGQRVGTEIWRIENFQPVPLPKSENGKFYMGDCYIVLQTTQG |
| | | | RGGAYLFDIHFWIGKDSSQDESGTAAIKTVELDSALGGRAVQHRELQGHESDKFL |
| | | | SYFKPCIIPLEGGVASGFKTPEEEEFETRLYVCRGKRVVRMKQVPFARSSLNHDDV |
| | | | FILDTQDKIYQFNGANSNIQERAKALEVIQFLKEKYHVGKCDVAIVDDGKLDTESD |
| | | | SGEFWVLFGGFAPIGKKVASEDDIIPEATPAKLYSITDGQVKIIEGELSKSLLENNR |
| | | | CYLVDCGSEVFVWVGRVTQVEERKTAIQAAEEFVASQNRPKSTRITRLIQGYETHS |
| | | | FKSNFGSWPLGSATPGNEEGRGKVAALLKQQGVGVKGMTKSAPVNEEVPPLLEG |
| | | | GGKMEVWRINGSAKTPLPREDIGKFYSGDCYIVLYTYHSGDRKEDYFLCCWFGKD |
| | | | SIEEDQKMATRLANTMFNSLKGRPVQGRIFQGKEPPQFVALFQPMLVLKGGLSSG |
| | | | YKKIIADKGLVDETYTADSVALIQISGTSVHNNKAMQVDAVATSLNSMECFILQSG |
| | | | SSIFTWHGNQCTFEQQQLAAKVAEFLKPGVALKHAKEGTESSTFWFALGGKQSYT |
| | | | SKKVAQEIVRDPHLFTFSFNRGKFQVEEVHNFCQDDLLTEDILILDTHAEVFVWVG |
| | | | WSVDSKEKQNTFEIGQKYIEVAASLEGLSPQVPLYKVTEGNEPCFFTTYFQWDLTK |
| | | | AVVQGNSFQKKVALLFGIGHAVEDKSTGNQGGPTQRASALAALSSAFHPSSGKS |
| | | | GSMDKSNGSSQGPRQRAEALAALNSAFNSSSGTKTVAPRASAAGQGSQRAAAV |
| | | | AALSSVLTAEKKQSPDASPTRSSSSPPPESDAPEVPREVAEVKETEEVAPVSESNG |
| | | | EDSEPKQEQEEHDSGSSQTFSYDQLKAKSDNPVTGIDFKRREAYLSEEEFPTIFGI |
| | | | TKEAFYKLPKWKQDMQKRKFDLF |
| 1001 | 73 | Cyn_d | MSSAKAVLEPAFQGAGHKPGTEIWRIEDFKPVPLPKSDYGKFYRGDSYIVLQTTCN |
| | | | KGGAYLLDIHFWIGKDSSQDEAGTAAIKTVELDTMLGGRAVQHREPQGYESDKFL |
| | | | SYFKPCIIPLEGGFASGFKKPEEDKFETRLYICKGKRAIRVKEVPFARSQLNHDDVFI |
| | | | LDTEKKIYQFNGANSNIQERAKALEVIQHLKEKYHDGVCGVAIVDDGKLQAESDS |
| | | | GEFWVLFGGFAPIGKKTVSDDDVVLETTPPKLYSINNGQLKLEDTVLTKSILENTKC |
| | | | FLLDCGAELFVWVGRVTQVEDRKTASVAVENFILKQNRPKTTRITQVIQGYENHTF |
| | | | KSKFESWPVSNAAGNASAEEGRGKVAALLKQKGDVKGVSKSNAPVQDEVPPLLE |
| | | | SGDKLEVWCINENGKTCLEKEELGKFYSGDCYVVLYTYHSGDKREEFYLTYWIGK |
| | | | DSLPEDQEMALQTSNTIWNSLKGRPVLGRIYQGKEPPQFVALFQPMVILKGGISSG |
| | | | YKKFVEQKGLTDETYSADGIALVRISGTSVHNNKTLQVDSVSTSLSSTECFVLQSG |
| | | | KLMFTWIGNSSSFEQQQWAVKVAEFLKPGIAVKHCKEGTESSAFWSAIGGKRTYT |
| | | | SKNVAPDVFIRDPHLYTFSLRNGKMEVTEVFNFSQDDLLTEDMMIFDTHSEVFIWV |
| | | | GQCVETKDKQKAFEIGQKYVEHAVAFEGIAPDVPLYKVIEGNEPCFFRTYFSWDNT |
| | | | RSVIQGNSFEKKLSVLFGMRSEGGCKSSGDGGPTQRASALAALSSALNPSSQGK |
| | | | QSNERPTSSGDGGPTQRASAMAALTSALNPSSKPSSPQHQSRSGQGSQRAAAVA |
| | | | ALSNVLTAEGSSHSPHAEKTEVAPFSESEAEESPESFTDQDAQGGRTEPDVSHEQ |
| | | | TANENGGETTFSYDRLISKSTNPVGGIDYKRRETYLSDSEFETIFGMTKEEFYEQPR |
| | | | WKQELQKKKADLF |
| 1002 | 73 | Que_a | SSAKLDPAFQGAGQRVGTEIWRIENFQPVPLPKSEYGKFYMGDCYIVLQTAQGKG |
| | | | GAYTLDIHFWIGKDSSQDESGTAALKSVELDAVLGGRAVQHREIQGYESDKFLSY |
| | | | FKPCIIPLEGGVASGFKTPEEDVFETRLYVCRGKRVVRMKQVPFARSSLNHDDVFIL |
| | | | DTQNKIYQFNGANSNIQERAKALEVIQFLKEKYHVGTCDVAIVDDGKLDTESDSG |
| | | | EFWVLFGGFAPIGKKVTSEDDIIPEAAPAKLYSITDGQVKIVESGLSKSLLENNKCY |
| | | | LLDCGAEVFVWIGRVTQVEERKAAVQVAEEFLTGQNRPKSTRITRLIQGHETRSFK |
| | | | SNFDSWPSGSATPGNEEGRGKVAALLKQQGVGVKGMTKGAPVNEEVPPLLEGCG |
| | | | KMEVWRINGSAKTPLPKEDVGKFYSGDCYIVLYTYHSGDRKEDYLLCCWFGKDSI |
| | | | EEDQKMATRLASTMFNSLKGRPVQGRIFQGKEPPQFVALFQPMVVLKGGLSSGYK |
| | | | KFIADKGLTDETYTADSVALIQISGTSTHNNKAVQVDAAATSLNSMECFVLQSGS |
| | | | SIFSWHGNQSTFEQQQLAAKVSEFLRPGVALKHAKEGTESSSFWFPLGGKQSYTS |
| | | | KKVSQEIVRDPHLFTFSFNKGKFQVEEVYNFSQDDLLTEDILVFDTHAEVFVWVGQ |
| | | | SVDSREKQNAFEIGQKYIEMAASLEGLSSNVPLYKVTEGNEPCFFTTYFSWDQNK |
| | | | AVVQGNSFQKKIALLFGIGHVVEDKSSGNQGGPTQRASALAALSSAFHPSSGKPT |
| | | | QTDKSNGSNQGPRQRAEALAALNSAFNSSPGAKTSAPRPSGRGQGSQRAAAVAA |
| | | | LSSVLTAEKKSDESPTRSSSSPPPETNSPAETKSENDQSESEGPQEVAEIKESEEV |
| | | | APRSESNGGNSEPKQETVQENDSGSGRTFSYDQLKAKSDNPVTGIDFKRREAYLS |
| | | | DEEFQSVFGITKEAFNKLPRWKQDMQKKKVDLF |
| 1003 | 76 | Amb_a | QLQAFTKAYTDLESACSGLNVLVATYFADVPADAFKTLTTLPGVAGYTFDLVRGEK |
| | | | TLDLIKTSFPSGKYLFAGVVDGRNIWANDLAGSLSVL |
| 1004 | 76 | Amb_a | CSLLHTAVDLVNETKLDDEIKSWLAFAAQKVVEVNALAKALGGQKDEAFFSANAA |
| | | | AQASRKSSPRVNNEAVQKAAAGLKG |
| 1005 | 76 | Amb_a | KDEAYFSANAAAQASRKSSPRVTNEAVQKAAAALRGSDHRRATNVSARLDAQQK |
| | | | KLNLPILPTTTI |
| 1006 | 76 | Amb_a | KISEEEYVKAIKEEIFKVVQLQEELDIDVLVHGEPERNDMVEYFGEQLSGFAFTANG |
| | | | WVQSYGSRCVKPPIIYGDVSRPKAMTVFWSTM |
| 1007 | 76 | Amb_a | KISEEEYVKAIKEEIFKVVQLQEELDIDVLVHGEPERNDMVEYFGEQLSGFAFTANG |
| | | | WVQSYGSRCVKPPIIYGDVSRPKAMTVFWS |
| 1008 | 76 | Amb_p | DLEAYQLEAFTKAYSALESACSGLNVIVAIYFADVPAEAVKTLTSLPGVSGYTFDLV |
| | | | RGEKTLGLIKSNFPLGKYLFAVLFDGRNIWANDLAGSVAVLESLEGVVGKD |
| 1009 | 76 | Amb_p | MVHSSVLGFPRMGADRELKKANEAYWADKLSRDDLIKEGKRLRLEHWKIQKDAG |
| | | | VDVIPSNDFAFYDHLLDHIQLFNAIPERYSKHSLHKLDEYFAMGRGHQKDGVDVP |
| | | | SLEMVKWFDSNYHYVKPTLQDNQTFQLAENPKPVAEFLEAKEAGITTRPVLIGPVS |
| | | | FLALGKADRGQSVDPISLLEKLLPVYVELLQKLKEAGAEYVQIDEPVLVYDLPQKVK |
| | | | DAFKPAYEKLVSDSLPKLVLATYFGDIVHNFDVFPSLQGVAGIHIDLVRNPEQLESV |
| | | | AGKLGSNQVLSVGVVDGRNIWKTNFKRAIELVETAVQKLGKDRVLVATSSSLLHT |
| | | | PHSLDSEKKLPEEVKDWFSFAVQKVSEVVVIAKAVNDGPAAVREALEANAKSMQA |
| | | | RASSERTNNKAVKDRQASVTPEQHERKSAFPERYAQQKKHLSLPTFPTTTIGSFPQ |
| | | | TKEIRISRNKFTKGEITAEEYEKFIEKEIEEVVKIQDELGLDVYVHGEPERNDMVQYF |
| | | | GERLDGYVFTTKGWVQSYGSRCVRPPIIVGDISRPAPMTVKESKYAASVAKKPMK |
| | | | GMLTGPI |
| 1010 | 76 | Bet_v | MASHIVGYPRMGPKRELKFALESFWDGKTSAEDLQRVASDLRSSIWKQMADAGI |
| | | | KHIPSNTFSYYDQVLDTTALLGAVPPRYGWNGGEIGFDTYFSMARGNASVPAMEM |
| | | | TKWFDTNYHFIVPELGPDVKFSYASHKAVEEYKEAKALGVDTVPVLVGPVSYLLLS |
| | | | KPAKGVEKTFPLLSLLGKILPIYKEVISELKAAGATWIQFDEPTLVMDLDSHKLKAFT |
| | | | DAYSELESSLSGLNVIVETYFADVPAEAYKTLTALKGVTAFGFDLIRGTNTLDLIKGE |
| | | | FPKGKYLFAGVVDGRNIWANDLAASLGTLLALEGIVGKDKLVVSTSCSLLHTAVDL |
| | | | VNETKLDKEIKSWLAFAAQKVVEVNALAKALVGHKDEAFFSANAAALASRKSSPR |
| | | | VTNEAVQKAAAALKGSDHRRATNVSARLDAQQKKLNLPILPTTTIGSFPQTIELRR |
| | | | VRREYKANKISEEEYVKAIKEEINKVVKLQEELDIDVLVHGEPERNDMVEYFGEQLS |
| | | | GFAFTVNGWVQSYGSRCVKPPITYGDVSRPKPMTVFWSAAAQSMTARPMKGMLT |
| | | | GPV |
| 1011 | 76 | Bet_v | MASHVVGYPRMGPKRELKFALESFWDGKSSAEELKKVAADLRSSIWKQMADAGI |
| | | | KYIPSNTFSYYDQVLDTTAMLGAVPPRYGWSGGEIGFDVYFSMARGNASLPAMEM |
| | | | TKWFDTNYHFIVPELGPDVKFSYASHKAVDEFKEAKALGVDTVPVLVGPVSYLLLS |
| | | | KPAKGVEKSFSLLSLIDKILPVYKEVVTELKAAGATWIQFDEPSLILDLHAHQLQAF |
| | | | SHAYTELESSFSGLNVLIETYFADVSADAYKTLTSLKGVSGYGFDLVRGTQTLDLIK |
| | | | SGFPSGKYLFAGVVDGRNIWANDLASSLSILQTLEGTVGKDKIVVSTSCSLLHTAV |
| | | | DLVNETKLDKEIKSWLAFAAQKVVEVNALAKALSGHRDQAFFSANAAALASRKSS |
| | | | PRVTNEAVQKAAAALKGSDHRRATNVSARLDAQQKKLNLPILPTTTIGSFPQTIEL |
| | | | RRVRREYKANKISEEEYVKAIKEEINKVVKLQEELDIDVLVHGEPERNDMVEYFGE |
| | | | QLSGFAFTVNGWVQSYGSRCVKPPIIYGDVSRPKPMTVFWSAAAQSMTARPMKG |
| | | | MLTGPVTILNWSFVRNDQPRHETCYQIALAIKDEVEDLEKASINVIQIDEAA |
| 1012 | 76 | Cyn_d | MASHIVGYPRMGPKRELKFALESFWDGKSSAEDLEKVATDLRASIWKQMSEAGIK |
| | | | YIPSNTFSYYDQVLDTTAMLGAVPERYSWTGGEIGLSTYFSMARGNATVPAMEMT |
| | | | KWFDTNYHFIVPELGPTIKFTYASHKAVSEYKEAKALGIDTVPVLIGPVSYLLLSKPA |
| | | | KGVDKSFSLLSLLSSILPIYKEVVSELKAAGASWIQFDEPTLVKDLDAHELAAFTSA |
| | | | YAELESAFSGLNVLIETYFADIPAENYKTLTSLSGVTAYGFDLVRGSKTLDLVRSSFP |
| | | | SGKYLFAGAVDGRNIWADDLATSLSTLESLEAVVGKAKLVVSTSCSLMHTAVDLV |
| | | | NETKLDDEIKSWLAFAAQKVVEVNALAKALAGQKDEAYFAANAAAQASRRSSPRV |
| | | | TNEEVQKAAAALRGSDHRRATNVSARLDAQQKKLNLPVLPTTTIGSFPQTMDLRR |
| | | | VRREYKAKKISEEEYTNAIKEEISKVVKIQEELDIDVLVHGEPERNDMVEYFGEQLS |
| | | | GFAFTANGWVQSYGSRCVKPPITYGDVSRPNPMTVYWSKTAQSMTSRPMKGMLT |
| | | | GPV |
| 1013 | 76 | Cyn_d | MASHIVGYPRMGPKRELKFALESFWDGKSSAEDLEKVATDLRASIWKQMSEAGIK |
| | | | YIPSNTFSYYDQVLDTTAMLGAVPERYSWTGGEIGLSTYFSMARGNATVPAMEMT |
| | | | KWFDTNYHFIVPELGPTIKFTYASHKAVSEYKEAKALGIDTVPVLIGPVSYLLLSKPA |
| | | | KGVDKSFSLLSLLSSILPIYKEVVSELKAAGASWIQFDEPTLVKDLDAHELAAFTSA |
| | | | YAELESAFSGLNVLIETYFADIPAENYKTLTSLSGVTAYGFDLVRGSKTLDLVRSSFP |
| | | | SGKYLFAGAVDGRNIWADDLATSLSTLESLEAVVGKAKLVVSTSCSLMHTAVDLV |
| | | | NETKLDDEIKSWLAFAAQKVVEVNALAKALAGQKDEAYFAANAAAQASRRSSPRV |
| | | | TNEEVQKAAAALRGSDHRRATNVSARLDAQQKKLNLPVLPTTTIGSFPQTMDLRR |
| | | | VRREYKAKKISEEEYTNAIKEEISKVVKIQEELDIDVLVHGEPERNDMVEYFGEQLS |
| | | | GFAFTANGWVQSYGSRCVKPPITYGDVSRPNPMTVYWSKTAQSMTSRPMKGMLT |
| | | | GPVTILNWSFVRNDQPRFETCYQIALAIKKEVEDLEAAGIQVIQIDEAA |
| 1014 | 76 | Que_a | MASHIVGYPRMGPKRELKFALESFWDGKSSAEELQKVSADLRSSIWKQMADAGI |
| | | | KYIPSNTFAYYDQVLDTTAMLGAVPPRYGWNGGEIGFDTYFSMARGNASVPAMEM |
| | | | TKWFDTNYHFIVPELGPDVNFSYASHKAVSEYKEAKALGVDTVPVLVGPVSYLLLS |
| | | | KPAKGVDKNFSLLSLLEKILPIYKEVISELKAAGASWIQFDEPTIVLDLDSHKLKAFT |
| | | | DAYSELESSLSGLNVLIETYFADIPAEAFKTLTALKGVTAFGFDLVRGTKTLDLIKAE |
| | | | FPKGKYLFAGVVDGRNIWANDLAASLSTLHALEGIVGKDKLVVSTSCSLLHTAVDL |
| | | | VNETKLDKEIKSWLAFAAQKVVEVNALAKALAGHKDDAFFSDNAAAQASRKSSPR |
| | | | VTNESVQKAAAALKGSDHRRATNVSARLDAQQKKLNLPILPTTTIGSFPQTIELRR |
| | | | VRREYKAKKISEDEYVKAIKEEINKVVKLQEELDIDVLVHGEPERNDMVEYFGEQL |
| | | | SGFAFTVNGWVQSYGSRCVKPPIIYGDVSRPNPMTVFWSSAAQSMTARPMKGML |
| | | | TGPV |
| 1015 | 76 | Que_a | MASHIVGYPRMGPKRELKFALESFWDGKSSAEELQKVSADLRSSIWKQMADAGI |
| | | | KYIPSNTFAYYDQVLDTTAMLGAVPPRYGWNGGEIGFDTYFSMARGNASVPAMEM |
| | | | TKWFDTNYHFIVPELGPDVNFSYASHKAVSEYKEAKALGVDTVPVLVGPVSYLLLS |
| | | | KPAKGVDKNFSLLSLLEKILPIYKEVISELKAAGASWIQFDEPTIVLDLDSHKLKAFT |
| | | | DAYSELESSLSGLNVLIETYFADIPAEAFKTLTALKGVTAFGFDLVRGTKTLDLIKAE |
| | | | FPKGKYLFAGVVDGRNIWANDLAASLSTLHALEGIVGKDKLVVSTSCSLLHTAVDL |
| | | | VNETKLDKEIKSWLAFAAQKVVEVNALAKALAGHKDDAFFSDNAAAQASRKSSPR |
| | | | VTNESVQKAAAALKGSDHRRATNVSARLDAQQKKLNLPILPTTTIGSFPQTIELRR |
| | | | VRREYKAKKISEDEYVKAIKEEINKVVKLQEELDIDVLVHGEPERNDMVEYFGEQL |
| | | | SGFAFTVNGWVQSYGSRCVKPPIIYGDVSRPNPMTVFWSSAAQSMTARPMKGML |
| | | | TGPVTILNWSFVRNDQPRHETCYQIALSIKDEVEDLEKAGINVIQIDEAA |
| 1016 | 77 | Amb_a | MVKFTAEELRRIMDFKHNIRNMSVIAHVDHGKSTLTDSLVAAAGIIAQEVAGDVR |
| | | | MTDTRADEAERGITIKSTGISLYYEMTDEALKSFKGERNGNEYLINLIDSPGHVDFS |
| | | | SEVTAALRITDGALVVVDCIEGVCVQTETVLRQALGERIRPVLTVNKMDRCFLELQ |
| | | | VDGEEAYQTFQRVIENANVIMATYEDPLLGDVMVYPEKGTVAFSAGLHGWAFTLT |
| | | | NFAKMYASKFGVDEAKMMERLWGENYFDPKTKKWTTKSTGSATCKRGFVQFCYE |
| | | | PIKQIINTCMNDKKDQLWPMLTKLGVTMKSEEKELMGKALMKRVMQNWLPAATA |
| | | | LLEMMIFHLPSPHTAQRYRVENLYEGPLDDQYANAIRNCDPDGPLMLYVSKMIPAS |
| | | | DKGRFFAFGRVFAGRVSTGLKVRIMGPNYVPGEKKDLYVKSVQRTVIWMGKKQE |
| | | | TVEDVPCGNTVAMVGLDQFITKNATLTNEKEVDAHPIRAMKFSVSPVVRVAVQCK |
| | | | VASDLPKLVEGLKRLAKSDPMVVCTIEESGEHIIAGAGELHLEICLKDLQDDFMGG |
| | | | AEIVVSDPVVSFRETVLEKSSRTVMSKSPNKHNRLYMEARPMEDGLAEAIDEGRV |
| | | | GPRDDPKVRGKILSEEFGWD |
| 1017 | 77 | Amb_p | DFMGGAEIVVSDPVVSFRETVLEKSSRTVMSKSPNKHNRLYMEARPMEDGLAEAI |
| | | | DEGRVGPRDDPKVRGKILSEEFGWDKDLAKKIWCFGPETTGPNMVVDMCK |
| 1018 | 77 | Amb_p | AIDEGRVGPRDDPKVRGKILSEEFGWDKDLAKKIWCFGPETTGPNMVVDMCKGV |
| | | | QYLNEIKDSVVAGFQWASKEGALAEENMRGICFEVCDVVLHADAIHRGGGQVIPT |
| | | | ARRVIYASQLTAKPRLLEPVYLVEIQAPEQALGGIYSVLNQRRGHVFEEMQRPGTPL |
| | | | YNIKAYLPVVESFGFSGALRASTSGQAFPQCVFDHWDMMSSDPLEAGSQASTLVS |
| | | | QIRKRKGLKEQMTPLSEFEDKL |
| 1019 | 77 | Bet_v | MVKFTADELRRIMDYKHNIRNMSVIAHVDHGKSTLTDSLVAAAGIIAQESAGDVR |
| | | | MTDTRADEAERGITIKSTGISLYYEMTDESLKSYKGERHGNEYLINLIDSPGHVDFS |
| | | | SEVTAALRITDGALVVVDCVEGVCVQTETVLRQALGERIRPVLTVNKMDRCFLELQ |
| | | | VDGEEAYQTFQRVIENANVIMATYEDPLLGDVQVYPEKGTVAFSAGLHGWAFTLT |
| | | | NFAKMYASKFGVDESKMMERLWGENFFDPATKKWTTKNSGSPTCKRGFVQFCYE |
| | | | PIKQIINTCMNDQKDKLWPMLQKLGVTMKSDEKDLMGKALMKRVMQTWLPASTA |
| | | | LLEMMIFHLPSPSKAQRYRVENLYEGPLDDIYANAIRNCDPEGPLMLYVSKMIPASD |
| | | | KGRFFAFGRVFSGKVSTGLKVRIMGPNFVPGEKKDLYTKSVQRTVIWMGKKQETV |
| | | | EDVPCGNTVALVGLDQYITKNATLTNEKEVDAHPIRAMKFSVSPVVRVAVQCKVA |
| | | | SDLPKLVEGLKRLAKSDPMVVCTIEESGEHIIAGAGELHLEICLKDLQDDFMGGAEI |
| | | | IKSDPVVSFRETVLEKSCRTVMSKSPNKHNRLYMEARPLEEGLAEAIDDGRIGPRD |
| | | | DPKARSKILSEEFGWDKDLAKKIWCFGPETTGPNMVVDMCKGVQYLNEIKDSVV |
| | | | AGFQWASKEGALAEENMRGICFEVCDVVLHADAIHRGGGQVIPTARRVIYASQIT |
| | | | AKPRLLEPVYLVEIQAPEQALGGIYSVLNQKRGHVFEEMQRPGTPLYNIKAYLPVVE |
| | | | SFGFSSTLRAATSGQAFPQCVFDHWEMMSSDPLEPGSQASQLVADIRKRKGLKE |
| | | | QMTPLSEFEDK |
| 1020 | 77 | Cyn_d | EELRKIMDKKNNIRNMSVIAHVDHGKSTLTDSLVAAAGIIAQEVAGDVRMTDTRA |
| | | | DEAERGITIKSTGISLYYEMTDDSLKSFKGDRDGNEYLINLIDSPGHVDFSSEVTA |
| | | | ALRITDGALVVVDCIEGVCVQTETVLRQALGERIRPVLTVNKMDRCFLELQVDGEE |
| | | | AYQTFSRVIENANVIMATYEDKLLGDVQVYPEKGTVAFSAGLHGWAFTLTNFAKM |
| | | | YASKFGVDESKMMERLWGENFFDPSTKKWTTKNTGSPTCKRGFVQFCYEPIKQII |
| | | | NTCMNDQKDKLWPMLQKLNVTMKSDEKELMGKALMKRVMQTWLPASTALLEMM |
| | | | IFHLPSPSTAQKYRVENLYEGPLDDIYATAIRNCDPEGPLMLYVSKMIPASDKGRFF |
| | | | AFGRVFSGRVATGMKVRIMGPNYVPGQKKDLYVKSVQRTVIWMGKKQESVEDVP |
| | | | CGNTVAMVGLDQFITKNATLTNEKEVDACPIRAMKFSVSPVVRVAVQCKVASDLP |
| | | | KLVEGLKRLAKSDPMVLCTIEESGEHIIAGAGELHLEICLKDLQEDFMGGAEIIVSP |
| | | | PVVSFRETVLEKSCRTVMSKSPNKHNRLYMEARPLEEGLPEAIDEGRIGPRDDPKV |
| | | | RSKILSEEFGWDKDLAKKIWCFGPETTGPNMVVDMCKGVQYLNEIKDSVVAGFQ |
| | | | WASKEGALAEENMRGICFEVCDVVLHADAIHRGGGQVIPTARRVIYASQLTAKPR |
| | | | LLEPVYLVEIQAPENALGGIYGVLNQKRGHVFEEMQRPGTPLYNIKAYLPVIESFGF |
| | | | SSTLRAATSGQAFPQCVFDHWDMMSSDPLEAGSQAAQLVLDIRKRKGLKEQMTP |
| | | | LSEFEDKL |
| 1021 | 77 | Que_a | MVKFTADELRRIMDLKENIRNMSVIAHVDHGKSTLTDSLVAAAGIIAQEVAGDVR |
| | | | MTDTRADEAERGITIKSTGISLYYEMSNESLKSYKGERNGNEYLINLIDSPGHVDF |
| | | | SSEVTAALRITDGALVVVDCIEGVCVQTETVLRQALGERIRPVLTVNKMDRCFLEL |
| | | | QVDGEEAYTSFQKVIENANVIMATYEDPLLGDVQVYPEKGTVAFSAGLHGWAFTL |
| | | | TNFAKMYASKFGVDESKMMERLWGENFFDPATKKWTTKNTGSPTCKRGFVQFCY |
| | | | EPIKQIINTCMNDQKDKLWPMLAKLGVTMKSEEKELMGKPLMKRVMQNWLPASS |
| | | | ALLEMMIFHLPSPSTAQKYRVENLYEGPLDDSYASAIRNCDPEGPLMLYVSKMIPAS |
| | | | DKGRFFAFGRVFSGKVSTGLKVRIMGPNFVPGEKKDLYLKSVQRTVIWMGKKQET |
| | | | VEDVPCGNTVALVGLDQYITKNATLTNEKEVDAHPIRAMKFSVSPVVRVAVQCKV |
| | | | ASDLPKLVEGLKRLAKSDPMVVCSIEESGEHIIAGAGELHLEICLKDLQDDFMGGA |
| | | | EISKTDPIVSFRETVLDKSSRVVMSKSPNKHNRLYMEARPMEEGLAEAIDDGRIGP |
| | | | RDDPKVRSKILAEEFGWDKDLAKKIWCFGPETTGPNMVVDMCKGVQYLNEIKDS |
| | | | VVAGFQWASKEGALAEENMRGICFEVCDVVLHADAIHRGGGQVIPTARRVIYASQ |
| | | | LTAKPRLLEPVYMVEIQAPEQALGGIYSVLNRKRGHVFEEMQRPGTPLYNIKAYLPV |
| | | | KESFGFSQDLRAATSGQAFPQCVFDHWDIVSSDPLEAGSVAAQLVTDIRQRKGLK |
| | | | EQMTPLSDYEDKL |
| 1022 | 77 | Que_a | MVKFTADELRRIMDLKENIRNMSVIAHVDHGKSTLTDSLVAAAGIIAQEVAGDVR |
| | | | MTDTRADEAERGITIKSTGISLYYEMSNESLKSYKGERNGNEYLINLIDSPGHVDF |
| | | | SSEVTAALRITDGALVVVDCIEGVCVQTETVLRQALGERIRPVLTVNKMDRCFLEL |
| | | | QVDGEEAYTSFQKVIENANVIMATYEDPLLGDVQVYPEKGTVAFSAGLHGWAFTL |
| | | | TNFAKMYASKFGVDESKMMERLWGENFFDPATKKWTTKNTGSPTCKRGFVQFCY |
| | | | EPIKQIINTCMNDQKDKLWPMLAKLGVTMKSEEKELMGKPLMKRVMQNWLPASS |
| | | | ALLEMMIFHLPSPSTAQKYRVENLYEGPLDDSYASAIRNCDPEGPLMLYVSKMIPAS |
| | | | DKGRFFAFGRVFSGKVSTGLKVRIMGPNFVPGEKKDLYLKSVQRTVIWMGKKQET |
| | | | VEDVPCGNTVALVGLDQYITKNATLTNEKEVDAHPIRAMKFSVSPVVRVAVQCKV |
| | | | ASDLPKLVEGLKRLAKSDPMVVCSIEESGEHIIAGAGELHLEICLKDLQDDFMGGA |
| | | | EIIKSDPVVSFRETV |
| 1023 | 86 | Amb_p | DSKVFYLKMKGDYHRYLAEFKTGAERKEAAESTLNAYKAAQDIANAELAPTHPIRL |
| | | | GLALNFSVFYYEILN |
| 1024 | 86 | Amb_p | PNHRLLPSFVEPLIIMAREENVYMAKLSEQAERYEEMVQYMENVSNSLTDSEELTIE |
| | | | ERNLLSVAYKNVIGARRASWRIISSIEQKEESRGNQDHVSVIKDYRSKIEKELSDI |
| | | | CDGILKLLDSKLVPSAGSGDSKVFYL |
| 1025 | 86 | Amb_p | IIYKKTTKMASETKPDVSNSDKDEQVQRAKLAEQAERYDDMAAAMKLVTETGVEL |
| | | | SNEERNLLSVAYKNVVGARRSSWRVISSIEQKTEGSERKQQMAREYREKVEKELR |
| | | | EICYDVLNLLDKFLIPKATNAESKVFYLKMKGDYYRYLAEVATGDARTGVVEESQK |
| | | | AYQEAFDISKNKMQPTHPIRLGLALNFSVFYYEILNAPERACQLAKQAFDDAIAELD |
| | | | TLNEDSYKDSTLIMQLLRDNLTLWTSDTQADEDEPEEKKESK |
| 1026 | 86 | Amb_p | AFDQNTCTPFLVNNTHPASNNLRFCTLPPLYQLFSSLHITMGYEDSVYLAKLAEQAE |
| | | | RYEEMVENMKAVASADQELSVEERNLLSVAYKNVIGARRASWRIVTSIEQKEESK |
| | | | GNETQVTLIKEYRQKIEAELAKICEDILECLDGHLIPSAESGESKVFYHKMKGDYHR |
| | | | YLAEFASGEKRKVAATAAHEAYKTATDVAQTELTPTHPIRLGLALNFSVFYYEILNSP |
| | | | DRACHLAKQAFDDAIAELDSLSEESYRDSTLIMQLLRDNLTLWTSSDGNEGEAAG |
| | | | ATDAPKEEAKTTEDAPAASEPKADEQPPAAAPAPAA |
| 1027 | 86 | Amb_p | SPPTVYPSIRICTHPHSLPITQTHINSTITMATERESKTFLARLCEQAERYDEMVTYM |
| | | | KEVAKVAGELTVDERNLLSVAYKNVVGTRRASWRIISSIEQKEESKGNETQVTLIK |
| | | | EYRQKIEAELAKICEDILECLDGHLIPSAESGESKVFYHKMKGDYHRYLAEFASGEK |
| | | | RKVAATAAHEAYKTATDVAQTELTPTHPIRLGLALNFSVFYYEILNSPDRACHLAKQ |
| | | | AFDDAIAELDSLSEESYRDSTLIMQLLRDNLTLWTSSDGNEGEAAGATDAPKEEA |
| | | | KTTEDAPAASEPKADEQPPAAAPAPAA |
| 1028 | 86 | Amb_p | IFYLKMKGDYFRYLAEFKTGADRKEAAESTLLAYKSAQDIALSDLAPTHPIRLGLAL |
| | | | NFSVFYYEILNSPDRACNLAKQAFDEAIAELDTLGEDSYKDSTLIMQLLRDNLTLWT |
| | | | SDIADEAGDEIKESTKAEETQ |
| 1029 | 86 | Amb_p | IIPPFHFSPLSCLPNNLFSPHSSFVHRFIYKMSNEKERETHVYSAKLAEQAERYDEM |
| | | | VESMKNVAKLNVELTVEERNLLSVGYKNVIGARRASWRIMSSIEQKEESKGNENN |
| | | | VSLIKGYRKKVEDELSKICSDILDIIDKHLIPSSGSGEATVFYYKMKGDYFRYLAEFK |
| | | | TDEERKEAADQSLKGYEAASASASTDLPSTHPIRLGLALNFSVFYYEIMNSPEKAC |
| | | | HLAKQAFDEAIAELDTLSEESYKDSTLIMQLLRDNLTLWTSDLPEDGGDENPKGEE |
| | | | PKSAEPEKKQ |
| 1030 | 86 | Amb_p | VEKVSETDELTLEERNLLSVAYKNVIGARRASWRIISSIEQKEESRGNEDHVKVIK |
| | | | DYRAKIEAELTRICDGILKLLDSRLVPSASSGDSKVFYLKMKGDYHRYLAEFKTAGE |
| | | | RKDAAESTLTAYKSAQDIANTELAPTHPIRLGLALNFSVFYYEILNSPDRACSLAKQ |
| | | | AFDEAIAELDTLGEESYKDSTLIMQLLRDNLTLWTSDMQEDGADEIKEASGAKQS |
| | | | EDQEQQQQ |
| 1031 | 86 | Amb_p | QPLFPPLFSPLHTFPLNNLTPKPLTHLQTHPNLSDHHPNPNKMSLSDREQNVYMAK |
| | | | LAEQAERYDEMVEFMEKVSQTEELTVEERNLLSVAYKNVIGARRASWRIISSIEQK |
| | | | EESRGNEEHVKVIKEYRGKIESELTKVCDGILKLLDSRLIPKASSGDSKVFYLKMKG |
| | | | DYHRYLAEFKTAGERKDAAESTLTAYKSAQDIANTELAPTHPIRLGLALNFSVFYYEI |
| | | | LNSPDRACSLAKQAFDEAIAELDTLGEESYKDSTLIMQLLRDNLTLWTSDMQEDG |
| | | | ADEIKEASGAKQSEDQEQQQQ |
| 1032 | 86 | Ant_o | PLRIRASQRATMSPAEPTREESVYMAKLAEQAERYEEMVEFMERVAKATGGAGPG |
| | | | EELSVEERNLLSVAYKNVIGARRASWRIISSIEQKEESRGNDAHAATIRSYRSKIEA |
| | | | ELAKICDGILALLDSHLVPSAAAAESKVFYLKMKGDYHRYLAEFKSGAERKEAAES |
| | | | TMNSYKAAQDIALADLAPTHPIRLGLALNFSVFYYEILNSPDRACNLAKQAFDEAIS |
| | | | ELDSLGEESYKDSTLIMQLLRDNLTLWTSDTNEDGGDEIKEAPAPKESEGQ |
| 1033 | 86 | Ant_o | QTRGKMSTAEATREENVYMAKLAEQAERYEEMVEFMEKVAKTADVGELTVEERNL |
| | | | LSVAYKNVIGARRASWRIISSIEQKEESRGNEAYVASIKEYRTRIETELSKICDGILK |
| | | | LLDSHLVPSATAAESKVFYLKMKGDYHRYLAEFKAGTERKEAAENTLVAYKSAQDI |
| | | | ALADLPTTHPIRLGLALNFSVFYYEILNSPDRACNLAKQAFDEAIAELDSLGEESYK |
| | | | DSTLIMQLL |
| 1034 | 86 | Bet_v | LFGIAKMSPADSSREENVYMAKLAEQAERYEEMVEFMEKVAKTVDVEELSVEERN |
| | | | LLSVAYKNVIGARRASWRIISSIEQKEESRGNEDHVAVIKEYRGKIESELSKICDGI |
| | | | LSLLESHLIPSASSAESKVFYLKMKGDYHRYLAEFKTSAERKEAAESTLLAYKSAQD |
| | | | IALAELAPTHPIRLGLALNFSVFYYEILNSPDRACNLAKQAFDEAISELDTLGEESYK |
| | | | DSTLIMQLLRDNLTLWTSDITDDAGDEIKEASKRESAEGQQPPSQ |
| 1035 | 86 | Bet_v | SISEKMSTEKERETQVYLAKLAEQAERYEEMVECMKNVARLDLELTVEERNLLSVG |
| | | | YKNVIGARRASWRIMSSIEQKEESKGNEHNVKLIKGYRQRVEEELSKICYDILGIID |
| | | | KHLIPSSTSGEATVFYYKMKGDYYRYLAEFKIDQERKEAAEESLKGYEAASATANT |
| | | | DLPSTHPIRLGLALNFSVFYYEIMNSPERACHLAKQAFDEAIAELDTLSEESYKDSTL |
| | | | IMQLLRDNLTLWTSDLPEDGGEDNLKVEESKPTEAEH |
| 1036 | 86 | Bet_v | ALFSEKKKKKEKINDDLSTSLLLHSTENNSFFPTLQDSLSIVKFRFHLNVTQFTSLS |
| | | | PSLSLFAPMASSLTREQYVYMAKLSEQAERYEEMVEYMEKLVTGSTPAAELNVEER |
| | | | NLLSVAYKNVIGSLRAAWRIVSSIEQKEEGRKNEEHVVLVKEYRSKMESELSVVCA |
| | | | GILKLLDSHLVPSALSGESKVFYLKMKGDYHRYLAEFKVGDERKAAAEDTMLAYKA |
| | | | AQDIALADLAPTHPIRLGLALNYSVFYYEILNSSEKACSMAKQAFEEAIAELDTLGE |
| | | | DSYKDSTLIMQLLRDNLTLWTSDMQEQIDEA |
| 1037 | 86 | Bet_v | PPSQHPLSTPPPPTSPPHSRPPLPSTTPRNTPAEMATERESKTFLARLCEQAERYDE |
| | | | MVTYMKEVAKIGGELTVDERNLLSVAYKNVVGTRRASWRIISSIEQKEEAKGTEKH |
| | | | VGIIREYRQKIELELEKVCEDVLNVLDESLIPKAETGESKVFYHKMKGDYHRYLAEF |
| | | | ASGPKRKGAATAAHEAYKSATDVAQTELTPTHPIRLGLALNFSVFYYEILNSPDRAC |
| | | | HLAKQAFDDAIAELDSLSEESYRDSTLIMQLLRDNLTLWTSADGNEGEGAKEEKPE |
| | | | EEAQAPAAEAAAAPAEEKPEEAKPVEADS |
| 1038 | 86 | Cyn_d | SIEQKEEGRGNEDRVTLIKDYRGKIETELTKICDGILKLLESHLVPSSTAPESKVFYL |
| | | | KMKGDYYRYLAEFKTGTERKDAAENTMVAYKAAQDIALAELAPTHPIRLGLALNFS |
| | | | VFYYEILNSPDRACSLAKQAFDEAISELDTLSEESYKDSTLIMQLLRDNLTLWTSDI |
| | | | SEDPAEEIREAAPKSGEGQ |
| 1039 | 6 | Cyn_d | VFYLKMKGDYHRYLAEFKTGAERKEAADATLAAYQAAQDIAIKELPPTHPIRLGLAL |
| | | | NFSVFYYEILNSPDRACSLAKQAFDEAISELDTLGEESYKDSTLIMQLLRDNLTLWT |
| | | | SDMQDDGGDEMRDASKPEDEQ |
| 1040 | 6 | Cyn_d | PPRHPTAMRVPHPPHPGGRVLLKCPTPPVASPNRTDASHPPQEDPLRRANPVAFPV |
| | | | PGSPEEIPPPAAMSPSEPTREESVYMAKLAEQAERYEEMVEFMERVARSAGGAGG |
| | | | GEELSVEERNLLSVAYKNVIGARRASWRIISSIEQKEEGRGNEAHAASIRAYRSKIE |
| | | | AELARICDGILALLDSHLVPSAGAAESKVFYLKMKGDYHRYLAEFKSGTERKEAAE |
| | | | STMNAYKAAQDIALADLAPTHPIRLGLALNFSVFYYEILNSPDRACNLAKQAFDEAI |
| | | | SELDSLGEESYKDSTLIMQLLRDNLTLWTSDTNEDGGDEIKEAAAPKESGDAQ |
| 1041 | 6 | Cyn_d | MAKLAEQAERYEEMVEYMEKVAKTVDVEELTVEERNLLSVAYKNVIGARRASWRI |
| | | | VSSIEQKEESRKNEEHVNLIKEYRGKIEAELSNICDGILKLLDSHLVPSSTAAESKV |
| | | | FYLKMKGDYHRYLAEFKTGAERKESAESTMVAYKAAQDIALAELAPTHPIRLGLAL |
| | | | NFSVFYYEILNSPDKACNLAKQAFDEAISELDTLGEESYKDSTLIMQLLRDNLTLWT |
| | | | SDLTEEGAEDGKEASKGEAGEGQ |
| 1042 | 6 | Cyn_d | MAKLAEQAERYEEMVEYMEKVAKTVDVEELTVEERNLLSVAYKNVIGARRASWRI |
| | | | VSSIEQKEESRKNEEHVNLIKEYRGKIEAELSNICDGILKLLDSHLVPSSTAAESKV |
| | | | FYLKMKGDYHRYLAEFKTGAERKESAESTMVAYKAAQDIALAELAPTHPIRLGLAL |
| | | | NFSVFYYEILNSPDKACNLAKQAFDEAISELDTLGEESYKDSTLIMQLLRDNLTLWT |
| | | | SDLTEEGAEEGKEAPKGDAGEGQ |
| 1043 | 6 | Fra_e | FRQHTQNSPSKKRALSQSRSLSLNSMASNREENVYVAKLAEQAERYEEMVEYMEK |
| | | | VATAVEGDELTMEERNLLSVAYKNVIGARRASWRIISSIEQKEESRGNEGHVSTIK |
| | | | GYRSKIESELSSICDGILKLLDSKLIGSASSGDSKVFYLKMKGDYYRYLAEFKTGAE |
| | | | RKEAAENTLSSYKSAQDIANAELAPTHPIRLGLALNFSVFYYEILNSSDLACNLAKQ |
| | | | AFDEAIAELDSLGEESYKDSTLIMQLLRDNLTLWTSDMQDDGSEEIKEAPKPDNE |
| 1044 | 86 | Fra_e | VLFNILKMSPADSSREENVYMAKLAEQAERYEEMVEFMEKVAKTVSTEELTVEERN |
| | | | LLSVAYKNVIGARRASWRIISSIEQKEESRGNEDHVNVIKEYRSKIEAELSKICDGI |
| | | | LSLLESHLVPSASSAETKVFYLKMKGDYHRYLAEFKTGAERKEAAESTLVAYKSAQ |
| | | | DIALADLAPTHPIRLGLALNFSVFYYEILNSPDRACNLAKQAFDEAIAELDTLGEESY |
| | | | KDSTLIMQLLRDNLTLWTSDITDDAGDEIKEASKPETGEGHQ |
| 1045 | 86 | Fra_e | SRGNEDHVKVLKEYRAKIEAELSKISGGILSLLDSHLITSASTAESKVFYLKMKGDY |
| | | | HRYLAEFKTGAER |
| 1046 | 86 | Fra_e | REKKVKKERRIIFIFTISSDSSLTQEDIEMEKEREQQVYLARLAEQAERYDEMVEAM |
| | | | KSVAKLDVELTVEERNLVSVGYKNVIGARRASWRILSSIEQKEESKGHEQNVKRIK |
| | | | NYRQRVEDELTKICNDILSVIDEHLLPSSSTGESTVFYYKMKGDYYRYLGEFKTGD |
| | | | DRKEAADQSLKAYEAATSSASTDLPPTHPIRLGLALNFSVFYYEILNSPERACHLAK |
| | | | QAFDEAIAELDSLNEESYKDSTLIMQLLRDNLTLWTSDLPEEGGEQSKGDEAQRE |
| | | | VRFYDYNPVYNNIFKSLVST |
| 1047 | 86 | Lol_p | QTRGRMSTAEATREENVYMAKLAEQAERYEEMVEFM |
| 1048 | 86 | Lol_p | HAGPAPSAPGDLLKSPPLPAPASPTNTFTSSVPGSPQLPPYLPLAHPTMSPAEPTRE |
| | | | ESVYMAKLAEQAERYEEMVEFMERVAKATGGAGPGEELSVEERNLLSVAYKNVIG |
| | | | ARRASWRIISSIEQKEEGRGNDAHAATIRSYRTKIEAELAKICDGILALLDSHLVPS |
| | | | AGAAESKVFYLKMKGDYHRYLAEFKSGAERKEAAESTMNSYKAAQDIALADLAPT |
| | | | HPIRLGLALNFSVFYYEILNSPDRACNLAKQAFDEAISELDSLGEESYKDSTLIMQLL |
| | | | RDNLTLWTSDTNEDGGDEIKEAPAPKESGEGQ |
| 1049 | 86 | Lol_p | SWRIISSIEQKEESRGNEAYVASIKEYRTRIETELSKICDGILKLLDSHLVPSATAAE |
| | | | SKVFYLKMKGDYHRYLAEFKAGAERKEAAENTLVAYKSAQDIALADLPTTHPIRLGL |
| | | | ALNFSVFYYEILNSPDRACNLAKQAFDEAIAELDSLGEESYKDSTLIMQLLRDNLTL |
| | | | WTSDNADEGGDEIKEASKPEGEGH |
| 1050 | 86 | Lol_p | NPQKLKMAELSREENVYMAKLAEQAERYEEMVEFMEKVAKTVDSEELTVEERNLL |
| | | | SVAYKNVIGARRASWRIISSIEQKEESRGNEDRVTLIKDYRGKIETELTKICDGILK |
| | | | LLDSH |
| 1051 | 86 | Lol_p | MAKLAEQAERYEEMVEYMEKVAKTVDVEELTVEERNLLSVAYKNVIGARRASWRI |
| | | | VSSIEQKEEGRGNEEHVTLIKEYRGKIEAELSKICDGILKLLDSHLVPMSTAAESKV |
| | | | FYLKMKGDYHRYLAEFKASAERKEAAESTMVAYKAAQDIALAELAPTHPIRLGLALN |
| | | | FSVFYYEILNSPDKACNLAKQAFDEAISELDTLGEESYKDSTLIMQLLRDNLTLWTS |
| | | | DLTEEGGAEDGKEASKGEGAEGQ |
| 1052 | 86 | Lol_p | MAKLAEQAERYEEMVEYMEKVAKTVDVEELTVEERNLLSVAYKNVIGARRASWRI |
| | | | VSSIEQKEEGRGNEEHVTLIKEYRGKIEAELSKICDGILKLLDSHLVPMSTAAESKV |
| | | | FYLKMKGDYHRYLAEFKASAERKEAAESTMVAYKAAQDIALAELAPTHPIRLGLALN |
| | | | FSVFYYEILNSPDKACNLAKQAFDEAISELDTLGEESYKDSTLIMQLLRDNLTLWTS |
| | | | DITDDAGDEIKEASKPETGEGHQ |
| 1053 | 86 | Ole_e | RKREGSSSSLPYSQTHHSHRREDSEMEKEREQLVYLARLAEQAERYDEMVEAMK |
| | | | NVAKLDVELTVEERNLVSVGYKNVIGARRASWRILSSIEQKEESKGHEQNVKRIKS |
| | | | YRQRVEDELTKICNDILSVIDEHLLPSSSTGESTVFYHKMKGDYYRYLGEFKTGDD |
| | | | RKEAADQSLKAYEAATSAASTDLPPTHPIRLGLALNFSVFYYEILNSPERACHLAKQ |
| | | | AFDEAIAELDSLNEESYKDSTLIMQLLRDNLTLWTSDLPEEGGEQSKGDDAQGES |
| 1054 | 86 | Ole_e | SRSLSLNSMASNREENVYMAKLAEQAERYEEMVEYMEKVVTAVDGDELTVEERNL |
| | | | LSVAYKNVIGARRASWRIISSIEQKEESRGNEGHVSTIKGYRSKIESELSSICDGIL |
| | | | KLLDSKLIGSASSGDSKVFYLKMKGDYYRYLAEFKTGPERKEAAEHTLSSYKSAQD |
| | | | IANAELAPTHPIRLGLALNFSVFYYEILNSPELACNLAKQAFDEAIAELDTLGEESYK |
| | | | DSTLIMQLLRDNLTLWTSDMQDDGSEEIKEAPKPDNE |
| 1055 | 86 | Ole_e | VLYSTVKMSPADSSREENVYMAKLAEQAERYEEMVEFMEKVAKTVNAEEFSVEER |
| | | | NLLSVAYKNVIGARRASWRIISSIEQKEESRGNEDHVNVIKEYRVKIEAELCKICDG |
| | | | ILSLLESHLIPSASSAESKVFYLKMKGDYHRYLAEFKTGAERKEVAESTLLAYKSAQ |
| | | | DIALADLSPTHPIRLGLALNFSVFYYEILNSPDRACNLAKQAFDEAIAELDTLGEESY |
| | | | KDSTLIMQLLRDNLTLWTSDITDDAGDEIKDTSKPESGEEQQ |
| 1056 | 86 | Ole_e | IPSTPHISKPPNPFTLFPSDLIHILPSPCISFLFQKSGSPTIMAATAREENVYKAKLAE |
| | | | QAERYEEMVEFMEKVSESLTVNEELTVEERNLLSVAYKNVIGARRASWRIISSIEQ |
| | | | KEESRGNEDHVSTIKDYRSKIESELSNICDGILKLLESKLIVSASSGDSKVFYIKMK |
| | | | GDYHRYLAEFKTGAERKEAAESTLTAYKAAQDIANAELAPTHPIRLGLALNFSVFYY |
| | | | EILNSPDRACSLAKQAFDEAIAQLDTLGEESYKDSTLIMQLLRDNLTLWTSDMQD |
| | | | DGTDDIKEAPKRDDEQQGE |
| 1057 | 86 | Pla_l | TTSQPYRFEHLKMSREENVYMAKLAEQAERYEEMVEFMEKVAKTSDTDELTVEER |
| | | | NLLSVAYKNVIGARRASWRIISSIEQKEESRGNEDHVTIIKDYRGKIEAELSKICDG |
| | | | ILNLLETHLVPAASSAESKVFYLKMKGDYHRYLAEFKTGAERKEAAESTLLAYKSAQ |
| | | | DIALADLAPTHPIRLGLALNFSVFYYEILNSPDRACNLAKQAFDEAISELDTLGEESY |
| | | | KDSTLIMQLLRDNLTLWTSDTTDDAGDEIKETTKLVPGEGQE |
| 1058 | 86 | Pla_l | PHIIPLSLSHFPSKFTQSITPPIPNPPPMAAREDNVYMAKLAEQAERYEEMVEFMEK |
| | | | VSASLSDSDELTVEERNLLSVAYKNVIGARRASWRIISSIEQKEESRGNESHVSAI |
| | | | KSYRSKIENELSGICDGILKLLDTKLIGSAGNGDSKVFYLKMKGDYHRYLAEFKTG |
| | | | AERKEAAENTLSAYKAAQDIANAELAPTHPIRLGLALNFSVFYYEILNSPDRACNLA |
| | | | KQAFDEAIAELDTLGEESYKDSTLIMQLLRDNLTLWTSDMQDDNSEEIKEAPKPD |
| | | | NE |
| 1059 | 86 | Pla_l | PHIIPLSLSHFPSKFTQSITPPIPNPPPMAAREDNVYMAKLAEQAERYEEMVEFMEK |
| | | | VSASLSDSDELTVEERNLLSVAYKNVIGARRASWRIISSIEQKEESRGNEEHVSTI |
| | | | KDYRSKIEKELSDICDGILKLLDSRLIPSAATGDSKVFYLKMKGDYHRYLAEFKTGA |
| | | | NRKEAAESTLTAYKAAQDIANSELAPTHPIRLGLALNFSVFYYEILNSPDRACNLAK |
| | | | QAFDEAIAELDTLGEESYKDSTLIMQLLRDNLTLWTSDMQDEAADEVKEAPKAEE |
| | | | AEQQ |
| 1060 | 86 | Pla_l | PHIIPLSLSHFPSKFTQSITPPIPNPPPMAAREDNVYMAKLAEQAERYEEMVEFMEK |
| | | | VSASLSDSDELTVEERNLLSVAYKNVIGARRASWRIISSIEQKEESRGNESHVSAI |
| | | | KSYRSKIEDELSGICDGILKLLDTKLIGSAASGDSKVFYLKMKGDYHRYLAEFKTGA |
| | | | ERKEAAENTLSAYKAAQDIANAELAPTHPIRLGLALNFSVFYYEILNSPDRACNLAK |
| | | | QAFDEAIAELDTLGEESYKDSTLIMQLLRDNLTLWTSDMQDDTSEEIKEAPKPDNE |
| 1061 | 86 | Pla_l | CKWLKMSPAESSREDYVYLAKLAEQAERYEEMVEFMEKVAKSTESDELTVEERNL |
| | | | LSVAYKNVIGARRASWRIISSIEQKEESRGNEDHVKVIKEYRGKIETELNKICDGIL |
| | | | GLLDSHLVPSAASAESKVFYLKMKGDYYRYLAEFKIGAERKEAAENTLAAYKSAQD |
| | | | IALADLAPTHPIRLGLALNFSVFYYEILNSPDRACNLAKQAFDEAISELDTLGEESYK |
| | | | DSTLIMQLLRDNLTLWTSDTTDDAGDEIKESGKNDSGEGHE |
| 1062 | 86 | Pla_l | IVLFPSFPDPSAMTTEKERETHVYLAKLAEQAERYDEMVECMKQVAKLDVELSVDE |
| | | | RNLLSVGYKNVIGARRASWRIMSSIEQKEESKGNENNVKLIKDYRQKVEDELSKI |
| | | | CYDILEVIDKHLVPSSGSGEATVFYYKMKGDYFRYLAEFKTDQEKKEAAEQSLKGY |
| | | | EAASATANTDLPSTHPIRLGLALNFSVFYYEIMNSPERACHLAKQAFDEAIAELDTL |
| | | | SEESYKDSTLIMQLLRDNLTLWTSDLPEDGGDENGKAEETNTKPDENEKLLG |
| 1063 | 86 | Poa_p | PTRRHCHAGPAPSAPGDLLKSPPLLLRLPHKRVHLSPPSPDPLAHPSLFATMSPAEP |
| | | | TREESVYMAKLAEQAERYEEMVEFMERVAKATGGAGPGEELSVEERNLLSVAYKN |
| | | | VIGARRASWRIISSIEQKEEGRGNDAHAATIRSYRTQIEAELAKICEGILALLDSHL |
| | | | VPSAGAAESKVFYLKMKGDYHRYLAEFKSGAERKEAAESTMNAYKAAQDIALADL |
| | | | APTHPIRLGLALNFSVFYYEILNSPDRACNLAKQAFDEAISELDSLGEESYKDSTLIM |
| | | | QLLRDNLTLWTSDTNEEGGDDIKEAPAPKESGDGQ |
| 1064 | 86 | Poa_p | QTRGKMSTAEATREENVYMAKLAEQAERYEEMVEFMEKVAKTADVGELTVEERNL |
| | | | LSVAYKNVIGARRASWRIISSIEQKEESRGNEAYVASIKEYRTRIETELSKICDGILK |
| | | | LLDSHLVPSATAAESKVFYLKMKGDYHRYLAEFKAGAERKEAAENTLVAYKSAQDI |
| | | | ALADLPTTHPIRLGLALNFSVFYYEILNSPDRACNLAKQAFDEAIAELDSLGEESYK |
| | | | DSTLIMQLLRDNLTLWTSDNADEGGDEIKEASKPEGEGH |
| 1065 | 86 | Poa_p | RTRGKMSTAEATREENVYMAKLAEQAERYEEMVEFMEKVAKTADVGELTVEERNL |
| | | | LSVAYKNVIGARRASWRIISSIEQKEESRGNEAYVASIKEYRTRIETELSKICDGILK |
| | | | LLDSHLVPSATAAESKVFYLKMKGDYHRYLAEFKAGAERKEAAENTLVAYKSAQDI |
| | | | ALADLPTTHPIRLGLALNFSVFYYEILNSPDRACNLAKQAFDEAIAELDSLGEESYK |
| | | | DSTLIMQLLRDNLTLWTSDNADEGGDEIKEASKPEGEGH |
| 1066 | 86 | Que_a | LSSHPGGQRAWGSEHPSLYLSGHVLLNPQKQFQTLLSFSTFISFFISFHCILFVWLR |
| | | | LRLETERLAMAIDKERENHVYIAKLAEQAERYDEMVDAMTKVANMDVELSVEERN |
| | | | LLSVAYKNVVGARRASWRILSSLEQKEESKGNDLNVKRIKNYRHEIESELSRVCAD |
| | | | IIALIDEHLIPSCSVGESPVFFYKMKGDYYRYLAEFRADDERKETADLSMKAYQAAS |
| | | | TTAEAELPPTHPIRLGLALNFSVFYYEIMNSPERACALAKQAFDEAISELDSLSEESY |
| | | | KDSTLIMQLLRDNLTLWTSDIPENEVEEAPKLDSNAKAGGGEDAE |
| 1067 | 86 | Que_a | LFHFCSHTSFLSLTRTHTQRERNFSFFANQRAKMSPTDSSREENVYMAKLAEQAE |
| | | | RYEEMVEFMEKVAKTVDVEELTVEERNLLSVAYKNVIGARRASWRIISSIEQKEES |
| | | | RGNEDHVVIIKEYRGKIENELSKICDGILGLLETHLIPSASAAESKVFYLKMKGDYH |
| | | | RYLAEFKTGAERKEAAESTLLAYKSAQDIALAELPPTHPIRLGLALNFSVFYYEILNS |
| | | | PDRACNLAKQAFDEAISELDTLGEESYKDSTLIMQLLRDNLTLWTSDITDDAGDEI |
| | | | KEASKRESGEGQPPQQQ |
| 1068 | 86_51 | Amb_a | REENVYMAKLSEQAERYEEMVQYMENVSNSLTDSEELTIEERNLLSVAYKNVIGAR |
| | | | RASWRIISSIEQKEESRGNQDHVSVIKDYRSKIEKELSDICDGILKLLDSKLVPSAG |
| | | | SGDSKVFYLKMKGDYHRYLAEFKTGAERKEAAESTLNAYKAAQDIANAELAPTHPI |
| | | | RLGLALNFSVFYYEILNSPDRACGLAKQAFDEAIAELDTLGEDSYKDSTLIMQLLRD |
| | | | NLTLWTSDMQDEGADEIKEAKQSEE |
| 1069 | 86_51 | Amb_a | REQNVYMAKLAEQAERYDEMVEFMEKVSQTEELTVEERNLLSVAYKNVIGARRAS |
| | | | WRIISSIEQKEESRGNEEHVKVIKEYRGKIESELTKVCDGILKLLDSRLIPKASSGD |
| | | | SKVFYLKMKGDYHRYLAEFKTAGERKDAAESTLTAYKSAQDIANTELAPTHPIRLGL |
| | | | ALNFSVFYYEILNSPDRACSLAKQAFDEAIAELDTLGEESYKDSTLIMQLLRDNLTL |
| | | | WTSDMQEDGGDEIKEAASGKQS |
| 1070 | 86_51 | Amb_p | REQNVYMAKLAEQAERYDEMVEFMEKVSQTEELTVEERNLLSVAYKNVIGARRAS |
| | | | WRIISSIEQKEESRGNEEHVKVIKEYRGKIESELTKVCDGILKLLDSRLIPKASSGD |
| | | | SKVFYLKMKGDYHRYLAEFKTAGERKDAAESTLTAYKSAQDIANTELAPTHPIRLGL |
| | | | ALNFSVFYYEILNSPDRACSLAKQAFDEAIAELDTLGEESYKDSTLIMQLLRDNLTL |
| | | | WTSDMQEDGGDEIKEAASGKQS |
| 1071 | 86_51 | Amb_p | MSLSDREQNVYMAKLAEQAERYDEMVEFMEKVSQTEELTVEERNLLSVAYKNVIG |
| | | | ARRASWRIISSIEQKEESRGNEEHVKVIKEYRGKIESELTKVCDGILKLLDSRLIPK |
| | | | ASSGDSKVFYLKMKGDYHRYLAEFKTAGERKDAAESTLTAYKSAQDIANTELAPTH |
| | | | PIRLGLALNFSVFYYEILNSPDRACSLAKQAFDEAIAELDTLGEESYKDSTLIMQLLR |
| | | | DNLTLWTSDMQEDGADEIKEASGAKQSED |
| 1072 | 86_51 | Bet_v | MSPADSSREENVYMAKLAEQAERYEEMVEFMEKVAKTVDVEELSVEERNLLSVAY |
| | | | KNVIGARRASWRIISSIEQKEESRGNEDHVAVIKEYRGKIESELSKICDGILSLLES |
| | | | HLIPSASSAESKVFYLKMKGDYHRYLAEFKTSAERKEAAESTLLAYKSAQDIALAEL |
| | | | APTHPIRLGLALNFSVFYYEILNSPDRACNLAKQAFDEAISELDTLGEESYKDSTLIM |
| | | | QLLRDNLTLWTSDITDDAGDEIKEASKRESAEG |
| 1073 | 86_51 | Cyn_d | MSPSEPTREESVYMAKLAEQAERYEEMVEFMERVARSAGGAGGGEELSVEERNLL |
| | | | SVAYKNVIGARRASWRIISSIEQKEEGRGNEAHAASIRAYRSKIEAELARICDGILA |
| | | | LLDSHLVPSAGAAESKVFYLKMKGDYHRYLAEFKSGTERKEAAESTMNAYKAAQD |
| | | | IALADLAPTHPIRLGLALNFSVFYYEILNSPDRACNLAKQAFDEAISELDSLGEESYK |
| | | | DSTLIMQLLRDNLTLWTSDTNEDGGDEIKEAAAPKESGD |
| 1074 | 86_51 | Que_a | MSPTDSSREENVYMAKLAEQAERYEEMVEFMEKVAKTVDVEELTVEERNLLSVAY |
| | | | KNVIGARRASWRIISSIEQKEESRGNEDHVVIIKEYRGKIENELSKICDGILGLLET |
| | | | HLIPSASAAESKVFYLKMKGDYHRYLAEFKTGAERKEAAESTLLAYKSAQDIALAEL |
| | | | PPTHPIRLGLALNFSVFYYEILNSPDRACNLAKQAFDEAISELDTLGEESYKDSTLIM |
| | | | QLLRDNLTLWTSDITDDAGDEIKEASKRESGEG |
| 1075 | 87 | Amba | YFRYYSMYGHVEKLAEEIKKGAASVEGVEAKLWQVPETLNEDVLGKMSAPPKSDV |
| | | | PVITANDLSEADGFVFGFPTRFGMMSAQFKAFFDSTGGLWRTQQLAGKPAGIFYS |
| | | | TGSQGGGQETTALTAITQLVHHGMIFVPIGYTFGAGMFEMEKVKGGSPYGAGTYA |
| | | | GDGSRQPSELELQQAFHQGKHIATIAKKLKGAA |
| 1076 | 87 | Amba | SVEGVEAKLWQVPETLNDEVLGKMSAPPKSDAPIITPNELAEADGFIFGFPTRFGM |
| | | | MAAQFKAFFDATGGLWRTQQLAGKPAGIFYSTGSQGGGQETTPLTAITQLVHHG |
| | | | MIFVPIGYTFGAGMFEMEKVKGGSPYGAGT |
| 1077 | 87 | Amb_p | MAPKIAIVYYSMYGHIKKMADAELKGIQEAGGDAKLFQVAETLPQDVLDKMYAPP |
| | | | KDSSVPVLEDPAVLEEFDGILFGIPTRYGNFPAQFKTFWDKTGKQWQQGSFWGKY |
| | | | AGVFVSTGTLGGGQETTAITSMSTLVHHGFIYVPLGYKTAFSMLANLDEVHGGSP |
| | | | WGAGTFSAGDGSRQPSELELNIAQAQGKAF |
| 1078 | 87 | Amb_p | PIITPNELAEADGFIFGFPTRFGMMAAQFKAFFDATGGLWRTQQLAGKPAGIFYST |
| | | | GSQGGGQETTPLTAITQLVHHGMIFVPIGYTFGAGMFEMEKVKGGSPYGAGT |
| 1079 | 87 | Bet_v | MATKVYIVYYSMYGHVEKLAEEIKKGASSVEGVEAQLWQVPETLQEEVLGKMSAP |
| | | | PKSDVAIITPNELAEADGFVFGFPTRFGMMAAQFKAFLDATGGLWRTQQLAGKPA |
| | | | GLFYSTGSQGGGQETTALTAITQLVHHGMIFVPIGYTFGAGMFEMESVKGGSPYG |
| | | | AGTFAGDGSRQPTDLELKQAFHQGQYIATITKKLKGAA |
| 1080 | 87 | Cyn_d | MAAKVYIVYYSTYGHVGKLAEEIKKGASSVEGVEAKLWQVPETLSEEVLGKMGAP |
| | | | PKPDVPVITPQELAEADGILFGFPTRFGMMAAQMKAFFDATGGLWREQSLAGKPA |
| | | | GIFFSTGTQGGGQETTPLTAITQLTHHGMVFVPVGYTFGAKLFGMDQVQGGSPYG |
| | | | AGTFAADGSRWPSEVELEHAFHQGKYFAGIAKKLKGSA |
| 1081 | 87 | Cyn_d | MAVKVYVVFYSTYGHVAKLAEEIKKGAASVEGVEVKLWQVPETLSEEVLGKMGAP |
| | | | PKTDVPVITPQELAESDGSLFGFPTRFGMMAAQMKAFFDATGGLWREQSLAGKPA |
| | | | GIFFSTGTQGGGQE |
| 1082 | 87 | Cyn_d | QGGGQETTPLTAVTQLTHHGMVFVPVGYTFGAKMFDMESVHGGSPYGAGTFAGD |
| | | | GSRWPTEVELEHAFHQGKYFAGI |
| 1083 | 87 | Que_a | MATKVYIVYYSMYGHVEKLAEEIRKGAASVEGVEAKLWQVPETLPEEVLGKMSAPP |
| | | | KSDVPIITPDQLTDADGLVFGFPTRYGMMAAQFKAFLDATGGLWRSQQLAGKPAG |
| | | | LFYSTGSQGGGQETTALTAITQLVHHGMIFVPIGYTFGAGMFEMEKVKGGSPYGA |
| | | | GTFAGDGSRQPTELELEQAFHQGKYIAAITKKLKGGAA |
| 1084 | 87 | Que_a | LAGKPAGLFYSTGSQGGGQETTPLTAITQLVHHGMIFVPIGYTFGAGMFEMEKVRG |
| | | | GTPYGAGTYAGDGSRQPSE |
| 1085 | 89 | Amb_p | MTHPTLAIPELMRLLMDEEGLGWDEAWDVTSKYLNLFMTVILKSVTILILLFGPK |
| 1086 | 89 | Amb_p | VFIIFFVFLRKPTHIPLLISSCVILFLQVNGVAQLHNDILKAELCACYVSIWPTKFQNK |
| | | | TNGITPRR |
| 1087 | 89 | Amb_p | SLEGNEGFGRGDYFLVGKDFPSYIECQEKVDEAYRDQKRWTRMSILNTAGSYKFS |
| | | | SDRTIHEYARDIWNIQPLQLP |
| 1088 | 89 | Ant_o | KRIVKLVNDVGAVVNNDPDVNKYLKVVFIPNYNVSVAEVLIPGSELSQHISTAGME |
| | | | ASGTSNMKFSLNGCVIIGTLDG |
| 1089 | 89 | Ant_o | SFPKIVRLAQFLGRAIAVPSRPLQKAPTGSHLSPSPIRCPNSEALSPPPPHARRLRIP |
| | | | HHSAMSAADKVKPAANPAAEDAKAIAGNISYHAQYSPHFSPLAFGPEPAYFATAES |
| | | | VRDHLLQRWNDTYLHFHKTDPKQTYYLSMEYLQGRALTNAVGNLNITGAYAEAVK |
| | | | KFGYELEALAGQERDMALGNGGLGRLAACFLDSMATLNLPAWGYGLRYRYGLFKQ |
| | | | RITKEGQEEVAEDWLEKFSPWEIVRHDVVYPVRFFGHVEISPDGSRKVAGGEVLN |
| | | | ALAYDVPIPGYKTKNAISLRLWDAKASAEDFNLFQFNDGQYESSAQLHSRAQQIC |
| | | | AVLYPGDATEEGKLLRLKQQFFLCSASLQDIIFRFKERKSDRVSGKWSEFPSKVAV |
| | | | QMNDTHPTLAIPELMRLLMDEEGLGWDEAWEVTNKTVAYTNHTVLPEALEKWSQ |
| | | | AVMRKLLPRQMEIIEEIDKRFREMVISTRKDMEGKLDLMSVLDNSPQKPVVRMAN |
| | | | LCVVSAHTVNGVAELHSNILKEELFADYVSIWPNKFQNKTNGITPRRWLRFCNPEL |
| | | | SEIVTKWLKTDKWTSNLDLLTGLRKFADDEKLHTEWAAAKLASKKRLAKHVLDVT |
| | | | GVTIDPNSLFDIQIKRIHEYKRQLMNILGAVYRYKKLKEMSAEEKQKVTPRTVMVG |
| | | | GKAFATYTNAKRIVKLVTDVGAVVNNDPDVNKYLKVVFIPNYNVSVAEVLIPGSEL |
| | | | SQHISTAGMEASGTSNMKFSLNGCVIIGTLDGANVEIREEVGEDNFFLFGAKADQ |
| | | | VAGLRKDRENGLFKPDPRFEEAKNYIRSGTFGTYDYTPLLDSLEGNSGFGRGDYFL |
| | | | VGYDFPSYIDAQARVDEAYKNKKRWIKMSILNTAGSGKFSSDRTIAQYAKEIWGI |
| | | | TASPVP |
| 1090 | 89 | Bet_v | QIVMAAIREVNGSTGCTISAKVPAVAQPLAEEPAAIASNINYHAQFSPHFSPFKFEP |
| | | | EQAYYATAESVRDRLVQQWNETYVHFHKVDPKQTYYLSMEYLQGRALTNAIGNLK |
| | | | VQDAYGDALKKLGHKLEEITEEEKDAALGNGGLGRLASCFLDSMATLNLPAWGYG |
| | | | LRYKYGLFKQRFTKEGQEEIAEDWLEKFSPWEVVRHDIVYPVRFFGHVEVNPNESR |
| | | | KWVGGEVVQALAYDVPIPGYNTKNTISLRLWEAKACAEDFNLFQFNDGQYESAAQ |
| | | | LHSRAQQICAVLYPGDATENGKLLRLKQQFFLCSASLQDIIFRFKERRLGKGSWQ |
| | | | WSEFPSKVAVQLNDTHPTLAIPELMRLLMDDEGLGWDEAWDVTTRTVAYTNHTV |
| | | | LPEALEKWSQALMWKLLPRHMEIIGEIDKRFIAMIQKTQSDLESKLPSMRILDDNP |
| | | | QKPVVRMANLCVVSAHTVNGVAQLHSDILKSELFADYVSIWPTKFQNKTNGITPR |
| | | | RWLRFCSPELSNIITKWLKSEQWVTNLDLLAGLRQFADNVGFQDEWASAKMANK |
| | | | HRLAQYIERVTGVSIDPNSLFDIQVKRIHEYKRQLLNILGAIYRYKKLKEMSPEQRK |
| | | | NTTARTIMFGGKAFATYTNAKRIVKLVNDVGAVVNTDPEVNSYLKVVFVPNYNVSV |
| | | | AEMLIPGSELSQHISTAGMEASGTSNMKFALNGCLIIGTLDGANVEIREEIREENFF |
| | | | LFGATADEVPRLRKERENGLFKPDPRFEEAKQFIRSGAFGSYDYNPLLESLEGNSG |
| | | | YGRGDYFLVGHDFPSYMDAQAKVDEAYKDRKRWQKMSILSTAGSGKFSSDRTIA |
| | | | QYAKEIWKIGECRVP |
| 1091 | 89 | Bet_v | ASERERAMAASQFSATPIRPEALTQCNSLTRVFGFGSRSIRSKLLSIRTLSSRPSRR |
| | | | CFSVKNVSGETKQKLNPITEEGAPATHTSFTPDAASIASSIKYHAEFTPLFSPERFEL |
| | | | PKAFFATAQSVRDALLINWNATYDYYENLNQKQAYYLSMEFLQGRALLNAIGNLEL |
| | | | NGAYAEALRKLGHKLEDVASQEPDAALGNGGLGRLASCFLDSLATLNYPAWGYGL |
| | | | RYKYGLFKQRITKDGQEEVAEDWLEMGNPWEIVRNDVSYPVKFYGNVVSGSDGI |
| | | | RHWIGGEDIMAVAYDVPIPGYKTKTTINLRLWSTKALSKDFDLYTFNAGEHTKAYE |
| | | | ALANAEKICYILYPGDESMEGKALRLKQQYTLCSASLQDIIARFERRSGANVKWED |
| | | | IPKKVAVQMNDTHPTLCIPELMRILIDLKGLSWKEAWNITQRTVAYTNHTVLPEALE |
| | | | KWSLELMQKLLPRHVEIIEMIDEELIQTIVSEYGTADSELLEKKLKEMRILENVDLPA |
| | | | ELADLFVKPKESPIVVLKTKESPVVVLKTEESPVVVPSEELEKSEEAVEPVDEEDGS |
| | | | EEKGTQEKEMVLPEPVPEPPKMVRMANLCVVGGHAVNGVAEIHSEIVKDEVFNAF |
| | | | FKLWPEKFQNKTNGVTPRRWIRFCNPDLSKIITDWTGTEDWVLNTEKLAELRKFA |
| | | | DNEDLHTQWRAAKRSNKMKVVSFLKEKTGYSVSPDAMFDIQVKRIHEYKRQLMN |
| | | | ILGIVYRYKKMKEMSEEERRAKFVPRVCIFGGKAFSTYVQAKRIVKFITDVGATVNH |
| | | | DPEIGDLLKVVFVPDYNVSVAELLIPASELSQHISTAGMEASGTSNMKFAMNGCLL |
| | | | IGTLDGANVEIREEVGPDNFFLFGAKAHEIAGLRKERAEGKFVPDPCFEEVKEFVKS |
| | | | GAFGSNNYDELMGSLEGNEGFGCADYFLVGKDFPSYIECQENVDEAYQDQKRWT |
| | | | KMSILNTAGSYKFSSDRTIHEYAKDIWNIEPAQLP |
| 1092 | 89 | Cyn_d | SRPRPVYRIRRPPHVSPARLLEKPLPGSQTSSHSRSSIPRSWSVLVRRESPRLLDAI |
| | | | PQCREPAMPESKCGAAEKVAPAATPAAEKPADIAGNISYHATYSPHFAPLNFGPEQ |
| | | | AFYATAESVRDHLIQRWNETYLHFHKTDPKQTYYLSMEYLQGRALTNAVGNLGITG |
| | | | AYAEAVKKFGYELEALAAEEKDAALGNGGLGRLASCFLDSMATLNLPAWGYGLRY |
| | | | RYGLFKQRISKEGQEEIAEDWLDKFSPWEIPRHDVVFPVRFFGHVEILPNGTRKWV |
| | | | GGEVMKALAYDVPIPGYKTKNAISLRLWEAKATAEDFNLFQFNDGQYESSAQLHS |
| | | | RAQQICAVLYPGDATEEGKLLRLKQQFFLCSASLQDMIARFKERNPDRASGKWAE |
| | | | FPTKVAVQLNDTHPTLAIPELMRLLMDEEGLGWDEAWDITYRTVSYTNHTVLPEAL |
| | | | EKWSQIVMRKLLPRHMEIIEEIDKRFREMVISSHKEMEGKIDSMKVLDSSNPQKPV |
| | | | VRMANLCVVSSHTVNGVAELHSNILKQELFADYVSIWPSKFQNKTNGITPRRWLR |
| | | | FCNPELSELVTKWLKTDDWTSNLDLLTGLRKFADDEKLHAEWASAKLASKKRLAK |
| | | | YVLDVTGVEIDPTSLFDIQIKRIHEYKRQLLNILGVVYRYKKLKEMSAEERQKVTPR |
| | | | TVMLGGKAFATYTNAKRIVKLVNDVGAVVNNDPDVNKYLKVVFIPNYNVSVAEVLI |
| | | | PGSELSQHISTAGMEASGTSNMKFSLNGCVIIGTLDGANVEIREEVGEENFFLFGA |
| | | | KADQIAGLRKDRENGLFKPDPRFEEAKQLIRSGAFGSYDYEPLLDSLEGNSGFGRG |
| | | | DYFLVGYDFPSYIDAQNLVDKAYKDKKKWITMSILNTAGSGKFSSDRTIAQYAKEI |
| | | | WDIKASPVA |
| 1093 | 89 | Fra_e | GMFKPDPRFEEAKKFVRSGAFGTYDYNPLLDSLEGDSGYGRGDYFLVGHDFPSYM |
| | | | EAQARVDEAYKDRKRWIKMSILSTAGSGKFSSDRTISQYA |
| 1094 | 89 | Fra_e | RQIEKMATFSFYAATAVLSHRRSNSRLIDFSCRNGSCELFLTRRRVKSSFYVKSVS |
| | | | SEPKQEVIDPITEEGVHSYQSSFKPDAASIASSIKYHAEFTPLFSPEHFELPKAFYAT |
| | | | AQSVRDALIINWNATYDLYEKMNVKQAYYLSMEFLQGRALLNSIGNLELSGEYAEA |
| | | | LKKLGHSLESVASQEPDAALGNGGLGRLASCFLDSLATLNYPAWGYGLRYKYGLF |
| | | | KQRITKDGQEEVAENWLEMGNPWEIVRNDVSYPVKFYGKVLTGSDGKRRWIGGE |
| | | | DIVAVACDVPIPGYKTKTTINLRLWSTKVPSEQFDLYVFNAGEHTKACEAQANAEK |
| | | | ICYVLYPGDESTEGKILRLKQQYTLCSASLQDIIARFERRSGGNEIWEEFPEKVAVQ |
| | | | MNDTHPTLCIPELMRILMDLKGMSWEKAWSITQRTVAYTNHTVLPEALEKWSYEL |
| | | | MQKLLPRHVEIIEMIDEQLIQDIISEYGTSNPEMLEKKVNAMRILENVDLPPSLADLF |
| | | | AKPEEIII |
| 1095 | 89 | Fra_e | AKPEEIIIHETSDEVVLAHEDELEEKDPQEEKVVKPKQAPIPPKMVRMANLCVVGG |
| | | | HAVNGVAEIHSEIVRNEVFNDFFQLWPEKFQNKTNGVTPRRWIHFCNPDLSTIISK |
| | | | WIGTEDWVLNTEKLAELQKFADNEDLQIEWRAAKRSNKIKVASFLKDKTGYSVNP |
| | | | DAMFDIQVKRIHEYKRQLLNLLGIVYRYKKMKEMTAAERKEKFVPRVCIFGGKAFS |
| | | | TYIQAKRIVKFITDVGATINHDPDIADLLKVVFVPDYNVSVAELLIPASELSQHISTA |
| | | | GMEASGTSNMKFAMNGCLLIGTLDGANVEIRQEVGEDNFFLFGAQAHEIAALRKE |
| | | | RAEGKFVPDERFEEVKEFVKNGAFGPYNYDELMGSLEGNEGFGRADYFLVGKDFP |
| | | | SYIECQEKVDDAYRDQKRWTKMSILNTAGSSKFSSDRTIHEYAKDIWCIKPVELP |
| 1096 | 89 | Fra_e | AHLKTAPYYTMSATTVSLLTVGSSFSNPSVFSPCNFNRLLSTSLRPTKLHRSTHIFK |
| | | | LSNGFSSPLQASTTDNNDSITNVTTSGSSSTITFQNVDALDSTLFIIQARNKIGLLQ |
| | | | VITRVFKVLGLVVERATVEFEGDFFIKKFYIKNSEGKKIENVENLETIKKALMEAIEP |
| | | | GDASTGAEVRLGGRGWMRKAGLGFESLGDHRAKAEKMFRLMDGFLKNDPVSLQ |
| | | | KDIVYHVEYTVARSMFRFDDFEAYQALSHSVRDRLIERWHDTHHYFKKKDPKRLY |
| | | | FLSLEFLMGRSLSNSVINLGIRDQYVDALGQLGFEFEVLAEQEGDAALGNGGLARL |
| | | | SACQMDSLATLDFPAWGYGLRYQYGLFRQIIVDGFQHEQPDYWLNFGNPWEIER |
| | | | VQVSYAVKFYGTVEEEVSNGVNYKVWIPGETVEAVAYDNPIPGYGTRNAINLRLW |
| | | | AAKPSGQYDLESYNTGDYINAVVNRQKAEIISNVLYPDDRSYQGKELRLKQQYFFV |
| | | | SASVQDIIRRFKDAHENFEEFTEKVALQINDTHPSLAIVEVMRVLFDEEHLGWDKA |
| | | | WDIVCKIFSFTTHTVQPEGLEKIPVDLMGSLLPRHLQIIYDINYKFMEELKKKFGQD |
| | | | YSRHARMSIVEEGAVKSIRMANLSIVCCHMVNGVSKAHFELLKMRVFKDFYDLWP |
| | | | QKFQYKTNGVTQRRWIVVSNPSLCSVISKWLGTEAWVRNIDLLAGLQDYASDAEL |
| | | | QQEWGTVKKINKMRLAEYIETLSGVKVSLDAMFDVQIKRIHEYKRQLLNILGIIHRY |
| | | | DCIKNMNESDRRKVVPRVCIIGGKAAPGYEIAKKIIKLCHAVAEKINNDPVVGDLL |
| | | | KLIFIPDYNVSVAELVIPGSDLSQHISTAGHEASGTGSMKFLMNGCLLLATADGST |
| | | | VEIIEEIGADNMFLFGAKVNEVPALREQGASVRAPLQFVRVVRMVRDGYFGFKDYF |
| | | | ESLCDTLENGKDFYLLGADFASYLEAQAAADLTFVNQEKWTRMSILSTSGSGRFS |
| | | | SDRTIEEYAEQTWGIEPCKCPF |
| 1097 | 89 | Lol_p | RCANSEALSPPPPHALAQRIPHHTAMSAADKVKPAASPAAEDPAAIAGNISFHAQY |
| | | | SPHFSPLTFGPEPAYFATAESVRDHLLQRWNDTYLHFHKTDPKQTYYLSMEYLQGR |
| | | | ALTNAVGNLNITGAYAEAVKKFGYELEALAGQERDMALGNGGLGRLAACFLDSMA |
| | | | TLNLPAWGYGLRYRYGLFKQRITKEGQEEVAEDWLEKFSPWEIVRHDVVYPVRFF |
| | | | GHVEISPDGRRKAVGGEVLNALAYDVPIPGYKTKNAISLRLWDAKASAEDFNLFQF |
| | | | NDGQYESAAQLHSRAQQICAVLYPGDATEEGKLLRLKQQFFLCSASLQDIIFRFKE |
| | | | RKPDRASGKWSEFPSKVAVQMNDTHPTLAIPELMRILMDEEGLGWDEAWDVTNK |
| | | | TVAYTNHTVLPEALEKWSQAVMRKLLPRQMEIIEEIDKRFRELVISTRKDMEGKLD |
| | | | SMSVLDNSPQKPVVRMANLCVVAAHTVNGVAELHSNILKEELFADYLSIWPNKFQ |
| | | | NKTNGITPRRWLRFCNPELSEIVTKWLKTDQWTSNLDLLTGLRKFADDEKLHAEW |
| | | | AAAKLASKKRLAKHVLDVTGVTIDPNSLFDIQIKRIHEYKRQLMNILGAVYRYKKLK |
| | | | EMSAEEKQKVTPRTVMVGGKAFATYTNAKRIVKLVTDVGAVVNNDPDVNKYLKVV |
| | | | FIPNYNVSVAEVLIPGSELSQHISTAGMEASGTSNMKFSLNGCVIIGTLDGANVEIR |
| | | | EEVGQDNFFLFGAKADQVAGLRKDRENGLFKPDPRFEEAKQFVRSGAFGTYDYTP |
| | | | LLDSLEGNSGFGRGDYFLVGYDFPSYIDAQARVDEAYKDKKRWIKMSILNTAGSG |
| | | | KFSSDRTIAQYAKEIWGITASPVP |
| 1098 | 89 | Ole_e | FSPEHFELPKAFYATAQSVRDALIINWNATYDLYEKMNVKQAYYLSMEFLQGRALL |
| | | | NSIGNLELTGEYAEALKKLGHSLESVASQEPDAALGNGGLGRLASCFLDSLATLNY |
| | | | PAWGYGLRYKYGLFKQRITKEGQEEVAENWLEMGNPWEIVRNDVSYPVKFYGKVL |
| | | | TGLDGKRHWIGGEDIVAVACDVPIPGYKTKTTINLRLWSTKVPSEQFDLYAFNAGE |
| | | | HTKAREAQTNAEKICYILYPGDESTEGKILRLKQQYTLCTASLQDIIARFERRSGGN |
| | | | EIWEEFPEKVAVQMNDTHPTLCIPELMRILMDFKGMSWEKAWSITQRTVAYTNHT |
| | | | VLPEALEKWSYELMQKLLPRHVEIIEMIDEQLIQDIISEYGISNPEMLEKKVNAMRIL |
| | | | ENVDLPASLADLFAKPEEILIHETSDEVIHETSNEVIQETSDEVIHEISDEVVPAQED |
| | | | ELEGKDLQEEKVVKPEHAPIPPKMVRMANLCVVGGHAVNGVAEIHSEIVKKEVFN |
| | | | DFFQLWPEKFQNKTNGVTPRRWIHFCNPDLSTIISKWIGTDDWVLHTEKLAELQK |
| | | | FADNEDLQIEWRAAKRSNKIKVATFLKEKTGYLVSPDAMFDIQVKRIHEYKRQLLN |
| | | | ILGIVYRYKKMKEMTAAERKEKFVPRVCIFGGKAFATYIQAKRIVKFITDVGATINH |
| | | | DPDIGDLLKVVFVPDYNVSAAELLIPASELSQHISTAGMEASGTSNMKFAMNGCVL |
| | | | IGTLDGANVEIRQEVGEDNFFLFGAQAHEIAALRKERAEGKFVPDERFEEVKEFVRI |
| | | | GAFGPYNYDELMGSLEGNEGFGRADYFLVGKDFPSYIECQEKVDDAYRDQKRWT |
| | | | KMSVLNTAGSFKFSSDRTIHEYAKDIWSIKPMELS |
| 1099 | 89 | Pla_l | IPFTNHSLRIMAPGTEKATSDSTAPAVAKVPAVAHPLAEQPAEIASNISYHAQYSPH |
| | | | FSPLKFEPEQAYYATAESVRDRLIKQWNETYNLFNKANPKQTYYLSMEYLQGRALS |
| | | | NAVGNLDVQDAYASALQQLGHQLEEIVEQEKDAALGNGGLGRLASCFLDSMATL |
| | | | NLPAWGYGLRYRYGLFKQRIAKEGQEEIAEDWLEKFSPWEVVRHDVVFPVRFFGQ |
| | | | VAVLPSGARKLVGGETLQALAYDVPIPGYKTKNTNSLRLWEAKAGATDFDLFQFN |
| | | | DGQYESAAKLHSSAQQICAVLYPGDATESGKLLRLKQQFFLCSASLQDIIARFKER |
| | | | HATKEIKWSDFPSKVAVQLNDTHPTLAIPELMRLLMDEESLGWDEAWDITTRTIAY |
| | | | TNHTVLPEALEKWSQAVMWKLLPRHMEIITEIDKRFIQMIKSTRPDLEGKSSELCIL |
| | | | DNDPKKPVVRMANLCVVSAHTVNGVAQLHSDILKAELFVDYVSIWPTKFQNKTNG |
| | | | ITPRRWLKFCNPELSQIITKWLKTDQWVKNLDLLTNLRQFADNADLQSEWESAKL |
| | | | ASKKRLASYILRVTGETIDPNTLFDIQVKRIHEYKRQLLNILGAVYRYKKLKGMSPE |
| | | | DRKKTTPRTIMIGGKAFATYTNAKRIVKLVNDVGAVVNTDPEVNDLLKIVFVPNYN |
| | | | VSVAEVLIPGSELSQHISTAGMEASGTSNMKFALNGCLIIGTLDGANVEIREEIGED |
| | | | NFFLFGATADEVPRLRKEREEGKFKPDPRFEEAKQFIRSGAFGSYDYNPLLESLEGD |
| | | | TGYGRGDYFLVGHDFPAYMDAQERVDQAYKDRKRWAKMSILSTAGSGKFSSDRT |
| | | | IAQYASEIWKIKEHPVSSA |
| 1100 | 89 | Poa_p | GVLPVPPFGAPRLITSPATHAHRERSTQFPTAMSAADKVKPAASPAAEDPAAIAANI |
| | | | SYHAQYSPHFSPLAFGPEPAYFATAQSVRDHLLQRWNDTYLHFHKTDPKQTYYLS |
| | | | MEYLQGRALTNAVGNLDITGAYAEAVKKFGYELEALAGQERDMALGNGGLGRLAA |
| | | | CFLDSMATLNLPAWGYGLRYRYGLFKQRIAKEGQEEIAEDWLEKFSPWEIVRHDV |
| | | | VYPVRFFGHVEISPDGTRKSAGGEVLKALAYDVPIPGYKTKNAISLRLWDAKASAE |
| | | | DFNLFQFNDGQYESAAQLHSRAQQICAVLYPGDATEEGKLLRLKQQFFLCSASLQ |
| | | | DIIFRFKERKSDRVSGKWSEFPSKVAVQMNDTHPTLAIPELMRLLMDEEGLGWDE |
| | | | AWDVTNKTVAYTNHTVLPEALEKWSQSVMRKLLPRQMEIIEEIDKRFREMVISTRK |
| | | | DMEGKLDSMSVLDNSPQKPVVRMANLCVVSAHTVNGVAELHSNILKEELFADYVS |
| | | | IWPNKFQNKTNGITPRRWLKFCNPELSEIVTKWLKTDQWTSNLDLLTGLRKFADD |
| | | | EKLHAEWAAAKLASKKRLAKHVLDATGVTIDPTSLFDIQIKRIHEYKRQLMNILGA |
| | | | VYRYKKLKEMSAEEKQKVTPRTVMVGGKAFATYTNAKRIVKLVNDVGAVVNNDPD |
| | | | VNKYLKVVFIPNYNVSVAEVLIPGSELSQHISTAGMEASGTSNMKFSLNGCVIIGTL |
| | | | DGANVEIREEVGEDNFFLFGAKADQVAGLRKDRENGLFKPDPRFEEAKQYVRSGT |
| | | | FGTYDYTPLLDSLEGNSGFGRGDYFLVGYDFPSYIDAQARVDEAYKDKKRWTKMS |
| | | | ILNTAGSGKFSSDRTIAQYAKEIWGITASPVP |
| 1101 | 89 | Que_a | VRASEKERGENRYSKFAMAVSQFSAATSTGRSEALLTRSGLLGGGLGSRGSKSKV |
| | | | LLMRTWISRPVTVRRSFSVNSVSSDSNQTLKDPITQEEASTAHSSFTLDAASIASS |
| | | | IKYHAEFTPLFSPERFELPKAFFATAQSVRDALIINWNATYDYYEKLNVKQAYYLSM |
| | | | EFLQGRALLNAIGNLELTGAYAEALRNLGHKLEHVAIQEPDAALGNGGLGRLASCF |
| | | | LDSLATLNYPAWGYGLRYKYGLFKQRITKDGQEEVAEDWLEMGNPWEIVRNDVS |
| | | | YPVKFYGKVASGSDGKKHWIGGEDIKAVACDVPIPGYKTKTTINLRLWSTKALSE |
| | | | DFDLYAFNAGEHTKAYEALANAEKICYILYPGDESMEGKVLRLKQQYTLCSASLQD |
| | | | IIARFERRSGANVRWEEFPEKVAVQMNDTHPTLCIPELMRILIDLKGLSWKEAWNI |
| | | | TQRTVAYTNHTVLPEALEKWSLELMQKLLPRHVEIIEMIDEELIHTIVSEYGTEDYEL |
| | | | LEKKLKEMRILENVDLPSAFADLFVKLKPKESPVVVPSE |
| 1102 | 89 | Que_a | ALTNAIGNLNIQDAYGDALKKLGHELEEITEQEKDAALGNGGLGRLASCFLDSMAT |
| | | | LSLPAWGYGLRYKYGLFKQRITKEGQEEIAEDWLEKFSPWEVVRHDIIYPVRFFGS |
| | | | VEVNPNGSRNWVGGEVVQALAYDVPIPGYKTKNTISLRLWEAKACAEDFDLFQFN |
| | | | DSQYESAAELHSRAQQICAVLYPGDTKENGKLLRLKQQFFLCSASLQDIIFRFKER |
| | | | KLGKGSRQWSEFPSKVAVQMNDTHPTLAIPELMRLLMDEEGLGWDEAWDITTRT |
| | | | VAYTNHTVLPEALEKWSQAVMWKLLPRHMEIIGEIDKRFIAMIHKARPDLESKLPS |
| | | | MCILDNDPQKPVVRMANLCVVSAHTVNGVAQLHSDILKSELFADYVSLWPTKFQN |
| | | | KTNGITPRRWLRFCSPELSSIITKWLKTEEWIINLDLLTGLRQFADNADLQAEWAS |
| | | | AKMANKQRLAEYIERVTGVSIDPNSLFDIQVKRIHEYKRQLLNILGAIYRYKNLKEM |
| | | | SPEERKKTTSRTIMIGGKAFATYTNAKRIVKLVNDVGAVVNNDPEVNSYLKVVFVP |
| | | | NYNVSVAEILIPGSELSQHISTAGMEASGTSNMKFALNGCLIIGTLDGANVEIREEI |
| | | | GEENFFLFGATADEVPRLRKERENGKFKPDPRFEEAKEFIRSGAFGSYDFNPLLDSL |
| | | | EGNSGYGRGDYFLVGQDFPSYMDAQARVDEAYKDRKRWLKMSILSTAGSGKFSS |
| | | | DRTIAQYAKEIWNIEECRVP |
| 1103 | 89 | Que_a | CIAGDLGTFIPDSASIASSIKYHAEFTPSFSTEQFELPKAYFATAESVRDTLIINWNA |
| | | | TYDYYEMMNVKQAYYLSMEYLQGR |
| 1104 | 91 | Amb_a | MSNPRVYFDITIGGAPAGRIVMELFADQTPKTAENFRALCTGEKGTGRSGKPLHYQ |
| | | | GSSFHRVIPQFMLQGGDFTRGNGTGGESIYGEKFEDENFNLRHTGPGILSMANAG |
| | | | PGTNGSQFFICTVKTSWLDGKHVVFGQVVEGLDVVQAIEKVGSGSGSTSKQVTIA |
| | | | KSGQL |
| 1105 | 91 | Amb_a | AGRIVMELFADTTPRTAENFRALCTGEKGRGTSGKPLHYKGSSFHRVIPNFMCQG |
| | | | GDFTRGNGTGGESIYGNKFADENFIKKHTGPGILSMANAGPNTNGSQFFICTAKT |
| | | | EWLDGKHVVFGKV |
| 1106 | 91 | Amb_p | MANPKVFFDMTVGGAPAGRIVMELFADTTPRTAENFRALCTGEKGRGTSGKPLHY |
| | | | KGSSFHRVIPNFMCQGGDFTRGNGTGGESIYGNKFADENFIKKHTGPGILSMANA |
| | | | GPNTNGSQFFICTAKTEWLDGKHVVFGKVVEGMDVVKAIEKVGSGSGTCSKPVV |
| | | | VADCGQL |
| 1107 | 91 | Bet_v | MASNPKVFFDMEVGGQPVGRIVMELYADTTPRTAENFRALCTGEKGNGRSGKPLH |
| | | | YKKSSFHRVIPGFMCQGGDFTAGNGTGGESIYGAKFADENFIKKHTGPGILSMAN |
| | | | AGPGTNGSQFFICTAKTEWLDGKHVVFGQVVEGLDIVKAIEKVGSSSGRTSKPVV |
| | | | VADCGQL |
| 1108 | 91 | Cyn_d | MANPRVFFDMTVGGQPVGRIVMELYANEVPRTAENFRALCTGEKGTGKSGKPLHY |
| | | | KGSTFHRVIPDFMCQGGDFTRGNGTGGESIYGEKFPDEKFVRKHTGPGVLSMAN |
| | | | AGPNTNGSQFFICTVACPWLDGKHVVFGQVVEGMDVVKAIEKVGSRSGTTAKEV |
| | | | KIADCGQL |
| 1109 | 91 | Que_a | MASNPKVFFDMTIGGQPAGRIIMELYADVVPRTAENFRALCTGEKGAGRSGKPLH |
| | | | YKGSSFHRVIPGFMCQGGDFTAGNGTGGESIYGAKFADENFTKKHTGPGILSMAN |
| | | | AGPGTNGSQFFICTAKTEWLDGKHVVFGQIIEGMDVVKAVEKVGSSSGRTSKPVV |
| | | | VADCGQL |

TABLE 5
NTGA's with at least 1, 5 or 8 conserved peptides across GW, GT or Phl p and with co-release from
pollen together with major allergens

| Grass and | | | | | | | | Phl p | | | NTGA's or homolog | | |
|---|---|---|---|---|---|---|---|---|---|---|---|---|---|
| another | | GW | | | GT | | | Phl p, Amb p and | | | with “fast release” | | |
| pollen | | Phl p and Amb p | | | Phl p and Que a | | | Que a | | | from pollen | | |
| ≧1 | Th+ | ≧1 | ≧5 | ≧8 | ≧1 | ≧5 | ≧8 | ≧1 | ≧5 | ≧8 | GW | GT | Phl p |
| Col 1 | Col 2 | Col 3 | Col 4 | Col 5 | Col 6 | Col 7 | Col 8 | Col 9 | Col 10 | Col 11 | Col 12 | Col 13 | Col 14 |
| 1 | 1 | 1 | 1 | 1 | 1 | 1 | 1 | 1 | 1 | 1 | 1 | | |
| 2 | 2 | 2 | 2 | 2 | 2 | 2 | 2 | 2 | 2 | 2 | | | |
| 4 | 4 | 4 | 4 | 4 | 4 | 4 | 4 | 4 | 4 | 4 | 4 | | |
| 6 | 6 | 6 | 6 | 6 | 6 | 6 | 6 | 6 | 6 | 6 | 6 | | |
| 7 | 7 | 7 | 7 | 7 | 7 | 7 | 7 | 7 | 7 | 7 | 7 | | |
| 9 | 9 | 9 | | | 9 | | | 9 | | | | | |
| 10 | 10 | | | | 10 | | | | | | | | |
| 11 | 11 | 11 | | | 11 | | | 11 | | | | | |
| 16 | 16 | 16 | | | 16 | | | 16 | | | | | |
| 20 | 20 | 20 | 20 | | 20 | 20 | | 20 | 20 | | | | |
| 22 | 22 | 22 | 22 | | 22 | 22 | | 22 | 22 | | | | |
| 24 | 24 | 24 | 24 | 24 | 24 | 24 | 24 | 24 | 24 | 24 | 24 | 24 | 24 |
| 26 | 26 | 26 | 26 | 26 | 26 | 26 | | 26 | 26 | | 26 | | |
| 27 | 27 | 27 | | | 27 | 27 | | 27 | | | | | |
| 29 | 29 | 29 | 29 | | 29 | | | 29 | | | 29 | 29 | 29 |
| 30 | 30 | 30 | 30 | 30 | 30 | 30 | 30 | 30 | 30 | 30 | 30 | | |
| 32 | 32 | 32 | 32 | | 32 | 32 | | 32 | 32 | | | | |
| 34 | 34 | 34 | 34 | 34 | 34 | 34 | 34 | 34 | 34 | 34 | | | |
| 35 | 35 | 35 | | | 35 | | | 35 | | | | | |
| 39 | 39 | 39 | 39 | 39 | 39 | 39 | | 39 | 39 | | 39 | | |
| 40 | 40 | 40 | | | 40 | | | 40 | | | | | |
| 42 | 42 | 42 | 42 | | 42 | 42 | | 42 | 42 | | | | |
| 47 | 47 | 47 | | | 47 | | | 47 | | | 47 | | |
| 49 | 49 | 49 | | | 49 | | | 49 | | | | | |
| 51 | 51 | 51 | | | 51 | | | 51 | | | 39 | | |
| 53 | 53 | 53 | | | 53 | | | 53 | | | | | |
| 54 | 54 | 54 | | | 54 | | | 54 | | | | | |
| 56 | 56 | 56 | | | 56 | | | 56 | | | | 56 | |
| 59 | 59 | 59 | 59 | | 59 | 59 | | 59 | | | 59 | | |
| 62 | 62 | 62 | | | 62 | | | 62 | | | | | |
| 64 | 64 | 64 | | | 64 | | | 64 | | | 64 | | |
| 65 | 65 | | | | 65 | | | | | | | | |
| 72 | 72 | 72 | 72 | 72 | 72 | 72 | 72 | 72 | 72 | 72 | | | |
| 76 | 76 | | | | 76 | 76 | 76 | | | | | | |
| 77 | 77 | 77 | 77 | 77 | 77 | 77 | 77 | 77 | 77 | | | | |
| 79 | 79 | | | | | | | | | | | | |
| 83 | 83 | 83 | 83 | 83 | 83 | 83 | 83 | 83 | 83 | 83 | | | |
| 84 | 84 | 84 | 84 | | 84 | 84 | | 84 | 84 | | | | |
| 86 | 86 | 86 | 86 | 86 | 86 | 86 | 86 | 86 | 86 | 86 | 86 | | |
| 89 | 89 | 89 | | | 89 | 89 | 89 | 89 | | | | | |
| 90 | 90 | 90 | | | 90 | | | 90 | | | | | |
| 91 | 91 | 91 | | | 91 | | | 91 | | | 91 | 91 | 91 |
| 5/64 | 5/64 | 5/64 | 5/64 | 5/64 | 5/64 | 5/64 | 5/64 | | | | 5/64 | | |
| 39/59 | 39/59 | 39/59 | 39/59 | 39/59 | 39/59 | 39/59 | 39/59 | 39/59 | 39/59 | 39/59 | 39/59 | | |
| 49/54 | 49/54 | 49/54 | 49/54 | 49/54 | 49/54 | 49/54 | 49/54 | 49/54 | 49/54 | 49/54 | | | |
| 86/51 | 86/51 | 86/51 | 86/51 | 86/51 | 86/51 | 86/51 | 86/51 | 86/51 | 86/51 | 86/51 | 86/51 | | |

[0244] Table 5 lists NTGAs according to the number of PG+ peptides contained in their sequence. Column 1 shows NTGA's containing at least one TG+peptide; column 2 shows NTGA's containing at least one T cell epitope (Th+); columns 3, 4 and 5 show NTGA's containing at least one, five or eight peptide(s) conserved across Phl p and Amp p, respectively; columns 6, 7 and 8 show NTGA's containing at least one, five or eight peptide(s) conserved across Phl p and Que a, respectively and columns 9, 10 and 11 show NTGA's containing at least one, five or eight peptide(s) conserved across Phl p, Amp p and Que a, respectively.

[0245] Table 5 also shows which NTGA's or a homolog thereof that are released within a period overlapping with the release of major allergens from grass pollen and weed pollen (GW); from grass pollen and tree pollen (GT) or from both grass pollen, weed pollen and tree pollen (Phl p).

TABLE 6
No of PG+ or PP peptides per NTGA

| | | | PG+ & | | | | | | | | | | PG+ & | |
|---|---|---|---|---|---|---|---|---|---|---|---|---|---|---|
| NTGA | PG+ | PP | th+ | PP & Th+ | NTGA | PG+ | PP | PG+ & th+ | PP & Th+ | NTGA | PG+ | PP | th+ | PP & Th+ |
| 6 | 23 | 15 | 22 | 14 | 39 | 7 | 4 | 2 | 1 | 18 | 3 | 0 | 0 | 0 |
| 89 | 22 | 0 | 13 | 0 | 11 | 7 | 3 | 5 | 1 | 40 | 3 | 3 | 2 | 2 |
| 30 | 18 | 12 | 1 | 1 | 5 | 6 | 3 | 0 | 0 | 51 | 3 | 2 | 2 | 1 |
| 1 | 17 | 12 | 5 | 4 | 22 | 6 | 5 | 4 | 3 | 16 | 2 | 2 | 2 | 2 |
| 72 | 16 | 10 | 2 | 1 | 9 | 5 | 2 | 3 | 1 | 31 | 2 | 0 | 0 | 0 |
| 2 | 15 | 12 | 15 | 12 | 53 | 5 | 1 | 3 | 1 | 35 | 2 | 1 | 2 | 1 |
| 13 | 15 | 10 | 0 | 0 | 21 | 5 | 5 | 0 | 0 | 64 | 2 | 1 | 1 | 1 |
| 83 | 14 | 6 | 11 | 4 | 27 | 5 | 4 | 5 | 4 | 69 | 2 | 0 | 0 | 0 |
| 86 | 14 | 11 | 1 | 1 | 19 | 5 | 4 | 0 | 0 | 48 | 1 | 0 | 0 | 0 |
| 77 | 14 | 6 | 4 | 2 | 32 | 5 | 5 | 4 | 4 | 50 | 1 | 0 | 0 | 0 |
| 4 | 12 | 9 | 4 | 3 | 36 | 5 | 5 | 0 | 0 | 62 | 1 | 0 | 1 | 0 |
| 24 | 11 | 8 | 11 | 8 | 60 | 5 | 1 | 0 | 0 | 33 | 1 | 1 | 0 | 0 |
| 34 | 10 | 7 | 3 | 1 | 42 | 5 | 5 | 1 | 1 | 79 | 1 | 0 | 1 | 0 |
| 7 | 9 | 6 | 9 | 6 | 73 | 4 | 2 | 0 | 0 | 43 | 1 | 0 | 0 | 0 |
| 29 | 8 | 2 | 1 | 1 | 38 | 4 | 0 | 0 | 0 | 55 | 1 | 0 | 0 | 0 |
| 76 | 8 | 0 | 5 | 0 | 56 | 4 | 1 | 1 | 1 | 3 | 1 | 0 | 0 | 0 |
| 20 | 8 | 5 | 2 | 1 | 65 | 4 | 0 | 2 | 0 | 28 | 1 | 0 | 0 | 0 |
| 59 | 8 | 3 | 5 | 1 | 47 | 3 | 1 | 1 | 0 | 44 | 1 | 1 | 0 | 0 |
| 84 | 8 | 5 | 4 | 3 | 90 | 3 | 3 | 3 | 3 | 57 | 1 | 1 | 0 | 0 |
| 49/54 | 8 | 7 | 4 | 4 | 58 | 3 | 3 | 0 | 0 | 87 | 1 | 1 | 0 | 0 |
| 26 | 8 | 7 | 1 | 1 | 10 | 3 | 0 | 3 | 0 | 91 | 1 | 1 | 1 | 1 |
| | | | | | | | | | | Sum | 397 | 224 | 175 | 99 |

PG+; TG (Phl p) peptides with a mismatch of less than 3 to a corresponding peptide in at least one other non-grass pollen species
PP: TG (Phl p) peptides with a mismatch of less than 3 to a corresponding peptide within the non-grass pollen species Phl p, Amb p, Ole e, Fra e and Que a.

[0246] Table 6 shows NTGA's ranked according to the number of PG+ peptides contained in the NTGA. The table also shows number of PP peptides per NTGA and the number of peptides (Th+) recognized by T cells of a grass allergic donor population (n=20).

TABLE 7
NTGA's ranked according to the number of peptides and PP peptides per NTGA

| | # of TG | # | | | | | | | | # of TG | | % | # | | # | | |
|---|---|---|---|---|---|---|---|---|---|---|---|---|---|---|---|---|---|
| NTGA | peptides | any hit | % hit | # PG | % PG | # PP | % PP | # Th+ | NTGA | peptides | # any hit | hit | PG | % PG | PP | % PP | # Th+ |
| 1 | 21 | 18 | 86 | 18 | 86 | 12 | 57 | 0 | 89 | 32 | 32 | 100 | 29 | 91 | 0 | 0 | 4 |
| 30 | 24 | 24 | 100 | 22 | 92 | 12 | 50 | 0 | 38 | 18 | 17 | 94 | 8 | 44 | 0 | 0 | 0 |
| 86 | 16 | 16 | 100 | 15 | 94 | 11 | 69 | 0 | 48 | 16 | 15 | 94 | 3 | 19 | 0 | 0 | 0 |
| 6 | 29 | 28 | 97 | 26 | 90 | 11 | 38 | 9 | 78 | 15 | 2 | 13 | 0 | 0 | 0 | 0 | 0 |
| 13 | 15 | 15 | 100 | 15 | 100 | 10 | 67 | 0 | 8 | 14 | 12 | 86 | 1 | 7 | 0 | 0 | 0 |
| 72 | 23 | 23 | 100 | 19 | 83 | 10 | 43 | 0 | 76 | 14 | 12 | 86 | 9 | 64 | 0 | 0 | 0 |
| 4 | 18 | 18 | 100 | 15 | 83 | 9 | 50 | 0 | 50 | 12 | 7 | 58 | 1 | 8 | 0 | 0 | 0 |
| 2 | 26 | 26 | 100 | 19 | 73 | 9 | 35 | 5 | 62 | 12 | 10 | 83 | 3 | 25 | 0 | 0 | 2 |
| 24 | 15 | 14 | 93 | 13 | 87 | 8 | 53 | 2 | 47 | 9 | 9 | 100 | 5 | 56 | 0 | 0 | 0 |
| 26 | 9 | 9 | 100 | 8 | 89 | 7 | 78 | 0 | 52 | 9 | 7 | 78 | 2 | 22 | 0 | 0 | 1 |
| 49/54 | 10 | 9 | 90 | 8 | 80 | 7 | 70 | 3 | 79 | 8 | 8 | 100 | 1 | 13 | 0 | 0 | 0 |
| 34 | 12 | 10 | 83 | 10 | 83 | 7 | 58 | 0 | 43 | 7 | 6 | 86 | 1 | 14 | 0 | 0 | 0 |
| 7 | 12 | 12 | 100 | 11 | 92 | 6 | 50 | 4 | 55 | 6 | 3 | 50 | 1 | 17 | 0 | 0 | 0 |
| 77 | 14 | 14 | 100 | 14 | 100 | 6 | 43 | 0 | 81 | 6 | 5 | 83 | 2 | 33 | 0 | 0 | 0 |
| 83 | 21 | 18 | 86 | 17 | 81 | 6 | 29 | 0 | 3 | 5 | 4 | 80 | 3 | 60 | 0 | 0 | 0 |
| 32 | 5 | 5 | 100 | 5 | 100 | 5 | 100 | 0 | 10 | 5 | 5 | 100 | 3 | 60 | 0 | 0 | 0 |
| 42 | 5 | 5 | 100 | 5 | 100 | 5 | 100 | 0 | 18 | 5 | 5 | 100 | 4 | 80 | 0 | 0 | 0 |
| 21 | 8 | 6 | 75 | 5 | 63 | 5 | 63 | 0 | 28 | 5 | 5 | 100 | 2 | 40 | 0 | 0 | 0 |
| 22 | 8 | 7 | 88 | 7 | 88 | 5 | 63 | 0 | 31 | 5 | 5 | 100 | 3 | 60 | 0 | 0 | 0 |
| 84 | 10 | 10 | 100 | 9 | 90 | 5 | 50 | 0 | 46 | 5 | 1 | 20 | 0 | 0 | 0 | 0 | 1 |
| 20 | 13 | 13 | 100 | 9 | 69 | 5 | 38 | 0 | 63 | 5 | 3 | 60 | 0 | 0 | 0 | 0 | 0 |
| 19 | 5 | 5 | 100 | 5 | 100 | 4 | 80 | 0 | 65 | 5 | 5 | 100 | 5 | 100 | 0 | 0 | 0 |
| 36 | 5 | 5 | 100 | 5 | 100 | 4 | 80 | 0 | 66 | 5 | 3 | 60 | 0 | 0 | 0 | 0 | 0 |
| 40 | 5 | 4 | 80 | 3 | 60 | 3 | 60 | 0 | 67 | 5 | 5 | 100 | 3 | 60 | 0 | 0 | 0 |
| 5 | 8 | 8 | 100 | 7 | 88 | 3 | 38 | 0 | 68 | 5 | 4 | 80 | 0 | 0 | 0 | 0 | 0 |
| 27 | 8 | 8 | 100 | 5 | 63 | 3 | 38 | 0 | 69 | 5 | 4 | 80 | 3 | 60 | 0 | 0 | 0 |
| 58 | 8 | 7 | 88 | 3 | 38 | 3 | 38 | 0 | 70 | 5 | 5 | 100 | 1 | 20 | 0 | 0 | 0 |
| 11 | 9 | 9 | 100 | 8 | 89 | 3 | 33 | 0 | 71 | 5 | 3 | 60 | 0 | 0 | 0 | 0 | 0 |
| 90 | 9 | 9 | 100 | 5 | 56 | 3 | 33 | 0 | 82 | 5 | 3 | 60 | 1 | 20 | 0 | 0 | 0 |
| 39 | 10 | 10 | 100 | 7 | 70 | 3 | 30 | 0 | 85 | 5 | 5 | 100 | 0 | 0 | 0 | 0 | 0 |
| 16 | 5 | 5 | 100 | 3 | 60 | 2 | 40 | 0 | 92 | 5 | 2 | 40 | 0 | 0 | 0 | 0 | 0 |
| 51 | 5 | 5 | 100 | 3 | 60 | 2 | 40 | 0 | 93 | 5 | 5 | 100 | 0 | 0 | 0 | 0 | 0 |
| 59 | 13 | 13 | 100 | 11 | 85 | 2 | 15 | 0 | 61 | 4 | 2 | 50 | 0 | 0 | 0 | 0 | 0 |
| 29 | 15 | 14 | 93 | 13 | 87 | 2 | 13 | 0 | 74 | 4 | 2 | 50 | 1 | 25 | 0 | 0 | 0 |
| 9 | 16 | 14 | 88 | 8 | 50 | 2 | 13 | 0 | 12 | 3 | 0 | 0 | 0 | 0 | 0 | 0 | 0 |
| 35 | 5 | 5 | 100 | 4 | 80 | 1 | 20 | 0 | 14 | 2 | 2 | 100 | 0 | 0 | 0 | 0 | 0 |
| 44 | 5 | 5 | 100 | 3 | 60 | 1 | 20 | 0 | 15 | 2 | 0 | 0 | 0 | 0 | 0 | 0 | 0 |
| 56 | 5 | 5 | 100 | 4 | 80 | 1 | 20 | 0 | 17 | 2 | 1 | 50 | 0 | 0 | 0 | 0 | 0 |
| 57 | 5 | 5 | 100 | 2 | 40 | 1 | 20 | 0 | 23 | 2 | 0 | 0 | 0 | 0 | 0 | 0 | 0 |
| 60 | 5 | 5 | 100 | 5 | 100 | 1 | 20 | 0 | 75 | 2 | 1 | 50 | 0 | 0 | 0 | 0 | 0 |
| 64 | 5 | 5 | 100 | 3 | 60 | 1 | 20 | 0 | 80 | 2 | 0 | 0 | 0 | 0 | 0 | 0 | 0 |
| 87 | 5 | 4 | 80 | 3 | 60 | 1 | 20 | 0 | 25 | 1 | 0 | 0 | 0 | 0 | 0 | 0 | 0 |
| 91 | 5 | 5 | 100 | 1 | 20 | 1 | 20 | 2 | 37 | 1 | 0 | 0 | 0 | 0 | 0 | 0 | 0 |
| 33 | 9 | 1 | 11 | 1 | 11 | 1 | 11 | 0 | 41 | 1 | 1 | 100 | 0 | 0 | 0 | 0 | 0 |
| 53 | 13 | 12 | 92 | 5 | 38 | 1 | 8 | 3 | 45 | 1 | 0 | 0 | 0 | 0 | 0 | 0 | 0 |
| 73 | 29 | 27 | 93 | 17 | 59 | 1 | 3 | 0 | 88 | 1 | 0 | 0 | 0 | 0 | 0 | 0 | 0 |

[0247] Table 7 shows NTGA's ranked according to the number of PP peptides (# PP) contained in the NTGA. A PP peptide refers in this analysis to a peptide with a mismatch of less than 3 to a corresponding peptide within the non-grass pollen species Amb p, Pla I, Ole e, Fra e and Que a. The table also shows the number of PG peptides per NTGA: PG refers to a peptide with less than 3 mismatches to a corresponding peptide in another grass pollen species. Table also shows the number of peptides (# Th+) recognized by T cells of a grass allergic donor population (n=20) per NTGA.

TABLE 8
Table 8 - List of Pollen species

| | | | | | | | Major |
|---|---|---|---|---|---|---|---|
| | | Common | Latin name of | | | | Taxonomic |
| Category | ID | Name | species | Genus | Family | Order | group |
| Weed | | Giant ragweed | Ambrosia | Ambrosia | Asteraceae | Asterales | Magnoliopsidae |
| | | | trifida | | | | |
| Weed | | Short | Ambrosia | Ambrosia | Asteraceae | Asterales | Magnoliopsidae |
| | | Ragweed | artemisiifolia | | | | |
| Weed | Ambp | Western | Ambrosia | Ambrosia | Asteraceae | Asterales | Magnoliopsidae |
| | | ragweed | psilostachya | | | | |
| Herb | | Mugwort | Artemisia | Artemisia | Asteraceae | Asterales | Magnoliopsidae |
| | | | vulgaris | | | | |
| Herb | | Sunflower | Helianthus | Helianthus | Asteraceae | Asterales | Magnoliopsidae |
| | | | annuus | | | | |
| Tree | | Common | Alnus | Alnus | Betulaceae | Fagales | Magnoliopsidae |
| | | Alder | glutinosa | | | | |
| Tree | Bet v | European | Betula | Betula | Betulaceae | Fagales | Magnoliopsidae |
| | | white birch | Verrucosa | | | | |
| Tree | | Common | Carpinus | Carpinus | Betulaceae | Fagales | Magnoliopsidae |
| | | Hornbeam | betulus | | | | |
| Tree | | European | Castanea | Castanea | Betulaceae | Fagales | Magnoliopsidae |
| | | Chestnuts | sativa | | | | |
| Tree | | Common | Corylus | Corylus | Betulaceae | Fagales | Magnoliopsidae |
| | | Hazel | avellana | | | | |
| Tree | | European Hop- | Ostrya | Ostrya | Betulaceae | Fagales | Magnoliopsidae |
| | | hornbeam | carpinifolia | | | | |
| Tree | | Hazel- | Ostryopsis | Ostryopsis | Betulaceae | Fagales | Magnoliopsidae |
| | | hornbeam | | | | | |
| Tree | | American | Fagus | Fagus | Fagaceae | Fagales | Magnoliopsidae |
| | | Beech | grandifolia | | | | |
| Tree | | European | Fagus | Fagus | Fagaceae | Fagales | Magnoliopsidae |
| | | beech | sylvatica | | | | |
| Tree | Que a | White Oak | Quercus alba | Quercus | Fagaceae | Fagales | Magnoliopsidae |
| Tree | Fra e | European Ash | Fraxinus | Fraxinus | Oleaceae | Lamiales | Magnoliopsidae |
| | | | Excelsior | | | (Oleales) | |
| Tree | | Common | Ligustrum | Ligustrum | Oleaceae | Lamiales | Magnoliopsidae |
| | | Privet | vulgare | | | (Oleales) | |
| Tree | | Lilac | Syringa | Lilac | Oleaceae | Lamiales | Magnoliopsidae |
| | | | vulgaris | | | (Oleales) | |
| Tree | Ole e | European | Olea Europaea | Olea | Oleaceae | Lamiales | Magnoliopsidae |
| | | Olive | | | | (Oleales) | |
| Herb | Pla l | English | Plantago | Plantago | Plantaginaceae | Lamiales | Magnoliopsidae |
| | | plantain | lanceolata | | | (Oleales) | |
| Grass | Ant o | Sweet vernal | Anthoxanthum | Anthoxanthum | Poaceae | Poales | Liliopsida |
| | | grass | odoratum | | | | |
| Grass | Cyn d | Bermuda | Cynodon | Cynodon | Poaceae | Poales | Liliopsida |
| | | grass | dactylon | | | | |
| Grass | | Orchard Grass | Dactylis | Dactylis | Poaceae | Poales | Liliopsida |
| | | | glomerata L. | | | | |
| Grass | | Meadow | Festuca | Festuca | Poaceae | Poales | Liliopsida |
| | | fescue | pratensis | | | | |
| Grass | | Velvet Grass | Holcus lanatus | Holcus | Poaceae | Poales | Liliopsida |
| Grass | | Barley | Hordeum | Hordeum | Poaceae | Poales | Liliopsida |
| | | | vulgare | | | | |
| Grass | Lol p | Rye grass | Lollium | Lollium | Poaceae | Poales | Liliopsida |
| | | | Perenne | | | | |
| Grass | | Rice | Oryza sativa | Oryza | Poaceae | Poales | Liliopsida |
| Grass | | Bahia grass | Paspalum | Paspalum | Poaceae | Poales | Liliopsida |
| | | | notatum | | | | |
| Grass | | Canary Grass | Phalaris | Phalaris | Poaceae | Poales | Liliopsida |
| | | | aquatica | | | | |
| Grass | Phl p | Timothy grass | Phleum | Phleum | Poaceae | Poales | Liliopsida |
| | | | Pratense | | | | |
| Grass | Poa p | Kentucky blue | Poa pratensis | Poa | Poaceae | Poales | Liliopsida |
| | | grass | | | | | |
| Grass | | Rye | Secale Cereale | Secale | Poaceae | Poales | Liliopsida |
| Grass | | Johnson grass | Sorghum | Sorghum | Poaceae | Poales | Liliopsida |
| | | | halepense | | | | |
| Grass | | Wheat | Triticum | Triticum | Poaceae | Poales | Liliopsida |
| | | | aestivum | | | | |
| Grass | | Maize | Zea mays | Zea | Poaceae | Poales | Liliopsida |

[0248] Table 8 lists pollen species of the plant families Asteraceae, Betulaceae, Fagaceae, Oleaceae, Plantaginacea and Poaceae Pollen species used for the present conservation analysis are highlighted in grey colour.

TABLE 9

| Locus HLA DP | Locus HLA DQ | Locus HLA DR | |
|---|---|---|---|
| DPA1*01- | DQA1*0101-DQB1*0501 | DRB1*0101 | DRB1*0802 |
| DPB1*0401 | | | |
| DPA1*0103- | DQA1*0102-DQB1*0602 | DRB1*0301 | DRB1*0901 |
| DPA1*0201- | DQA1*0301-DQB1*0302 | DRB1*0401 | DRB1*1101 |
| DPA1*0201- | DQA1*0401-DQB1*0402 | DRB1*0404 | DRB1*1302 |
| DPA1*0301- | DQA1*0501-DQB1*0201 | DRB1*0405 | DRB1*1501 |
| | DQA1*0501-DQB1*0301 | DRB1*0701 | DRB3*0101 |
| | | | DRB4*0101 |
| | | | DRB5*0101 |

[0249] Table 9 shows a panel of 25 MHC II molecules (alleles) for which peptide binding affinities were predicted.

TABLE 10

Grass

| | | Phl p | | Ant o | | Cyn d | | Poa p | | Lol p | |
|---|---|---|---|---|---|---|---|---|---|---|---|
| | | | % | | % | | % | | % | | % |
| Anti- | | # of | Reac- | # of | Reac- | # of | Reac- | # of | Reac- | # of | Reac- |
| gen | Sequence | mm | tivity | mm | tivity | mm | tivity | mm | tivity | mm | tivity |
| NTGA | AVMLTFDNAG | 0 | 4 | 0 | 9 | 0 | 18 | 0 | 25 | 0 | 36 |
| 49 | MWNVR | | | | | | | | | | |
| NTGA | IGSFFYFPSIG | 0 | 0 | 2 | 3 | 2 | 9 | 1 | 2 | 0 | 6 |
| 54 | MQRT | | | | | | | | | | |
| NTGA | NPMTVFWSK | 0 | 0 | 1 | 0 | 2 | 1 | 0 | 0 | 1 | 1 |
| 76 | MAQSMT | | | | | | | | | | |
| NTGA | NGSQFFLCTA | 0 | 4 | 2 | 11 | 3 | 38 | 2 | 27 | 0 | 44 |
| 91 | KTAWL | | | | | | | | | | |
| NTGA | NGSQFFLCTA | 0 | 100 | 2 | 0 | 3 | 1 | 2 | 1 | 0 | 1 |
| 91 | KTAWL | | | | | | | | | | |
| NTGA | QYAKEIWGIT | 0 | | 1 | 2 | >3 | 10 | 1 | 22 | 1 | 24 |
| 89 | ANPVP | | | | | | | | | | |
| NTGA | FPIVQRFLEGA | 0 | 38 | 2 | 89 | 1 | 22 | 1 | 95 | 1 | 37 |
| 2 | SSID | | | | | | | | | | |
| NTGA | FPIVQRFLEGA | 0 | 100 | 2 | 100 | 1 | 39 | 1 | 100 | 1 | 100 |
| 2 | SSID | | | | | | | | | | |
| Lol p | LIEKINAGFKA | 1 | 24 | 3 | 4 | 0 | 1 | 1 | 41 | 0 | 39 |
| 51 | AVAA | | | | | | | | | | |
| Lol p | LIEKINAGFKA | 1 | 49 | 3 | 75 | 0 | 9 | 1 | 79 | 0 | 77 |
| 51 | AVAA | | | | | | | | | | |
| Lol p | NAGFKAAVAA | 2 | 0 | 0 | 36 | 0 | 3 | 2 | 23 | 0 | 35 |
| 51 | AAVVP | | | | | | | | | | |
| Lol p | NAGFKAAVAA | 2 | 0 | 0 | 2 | 0 | 10 | 2 | 22 | 0 | 24 |
| 51 | AAVVP | | | | | | | | | | |
| Lol p | NAGFKAAVAA | 2 | 70 | 0 | 100 | 0 | 100 | 2 | 100 | 0 | 100 |
| 51 | AAVVP | | | | | | | | | | |
| Lol p | SDAKTLVLNI | 2 | 36 | 2 | 24 | 0 | 18 | 2 | 74 | 0 | 47 |
| 3 | KYTRP | | | | | | | | | | |
| Lol p | SDAKTLVLNI | 2 | 100 | 2 | 100 | 0 | 29 | 2 | 100 | 0 | 100 |
| 3 | KYTRP | | | | | | | | | | |
| Lol p | SDAKTLVLNI | 2 | 0 | 2 | 35 | 0 | 2 | 2 | 37 | 0 | 52 |
| 3 | KYTRP | | | | | | | | | | |
| Lol p | SDAKTLVLNI | 2 | 36 | 2 | 100 | 0 | 55 | 2 | 100 | 0 | 100 |
| 3 | KYTRP | | | | | | | | | | |
| Lol p | MRNVFDDVV | 0 | 6 | 1 | 34 | >3 | 66 | 0 | 75 | 0 | 88 |
| 2 | PADFKV | | | | | | | | | | |
| Lol p | MRNVFDDVV | 0 | 69 | 1 | 68 | >3 | 10 | 0 | 91 | 0 | 82 |
| 2 | PADFKV | | | | | | | | | | |
| Lol p | MRNVFDDVV | 0 | 69 | 1 | 73 | >3 | 2 | 0 | 36 | 0 | 73 |
| 2 | PADFKV | | | | | | | | | | |
| Lol p | MRNVFDDVV | 0 | 18 | 1 | 55 | >3 | 1 | 0 | 67 | 0 | 72 |
| 2 | PADFKV | | | | | | | | | | |
| Lol p | MRNVFDDVV | 0 | 100 | 1 | 100 | >3 | 23 | 0 | 100 | 0 | 100 |
| 2 | PADFKV | | | | | | | | | | |
| Lol p | NVFDEVIPTAF | 2 | 75 | 3 | 0 | 3 | 0 | 2 | 42 | 0 | 96 |
| 3 | TVGK | | | | | | | | | | |
| Lol p | NVFDEVIPTAF | 2 | 81 | 3 | 60 | 3 | 0 | 2 | 100 | 0 | 100 |
| 3 | TVGK | | | | | | | | | | |
| Lol p | DAYVATLTEA | 2 | 91 | 1 | 95 | 0 | 1 | 2 | 100 | 0 | 100 |
| 5 1 | LRVIA | | | | | | | | | | |
| Lol p | DAYVATLTEA | 2 | 100 | 1 | 90 | 0 | 14 | 2 | 100 | 0 | 100 |
| 5 1 | LRVIA | | | | | | | | | | |
| Lol p | DAYVATLTEA | 2 | 16 | 1 | 58 | 0 | 9 | 2 | 36 | 0 | 34 |
| 5 1 | LRVIA | | | | | | | | | | |
| Lol p | DAYVATLTEA | 2 | 56 | 1 | 68 | 0 | 11 | 2 | 75 | 0 | 69 |
| 5 1 | LRVIA | | | | | | | | | | |
| Lol p | AFKIAATAAN | 2 | 1 | 2 | 48 | 2 | 0 | 2 | 12 | 0 | 5 |
| 5 2 | AAPTN | | | | | | | | | | |
| Lol p | AFKIAATAAN | 2 | 31 | 2 | 61 | 2 | 17 | 2 | 100 | 0 | 100 |
| 5 2 | AAPTN | | | | | | | | | | |
| Lol p | AFKIAATAAN | 2 | 21 | 2 | 68 | 2 | 0 | 2 | 65 | 0 | 100 |
| 5 2 | AAPTN | | | | | | | | | | |
| Poa p | DINVGFKAAV | 1 | 0 | >3 | 1 | 3 | 0 | 1 | 8 | 3 | 3 |
| 1 | AAAAG | | | | | | | | | | |
| Poa p | DINVGFKAAV | 1 | 6 | 3 | 8 | 3 | 3 | 1 | 7 | 3 | 6 |
| 1 | AAAAG | | | | | | | | | | |
| Poa p | DINVGFKAAV | 1 | 15 | 3 | 35 | 3 | 48 | 1 | 95 | 3 | 67 |
| 1 | AAAAG | | | | | | | | | | |
| Poa p | DINVGFKAAV | 1 | 12 | 3 | 18 | 3 | 13 | 1 | 21 | 3 | 47 |
| 1 | AAAAG | | | | | | | | | | |
| Poa p | EPIAAYHFDLS | 1 | 4 | 1 | 44 | 1 | 100 | 0 | 100 | 1 | 48 |
| 1 | GKAF | | | | | | | | | | |
| Poa p | EPIAAYHFDLS | 1 | 100 | 1 | 100 | 1 | 100 | 0 | 100 | 1 | 100 |
| 1 | GKAF | | | | | | | | | | |
| Poa p | FKAAVAAAAG | 2 | 2 | 2 | 62 | 2 | 31 | 0 | 26 | 1 | 68 |
| 5 | APPAD | | | | | | | | | | |
| Dac g | GSDEKNLALS | 1 | 32 | 0 | 58 | >3 | 8 | 1 | 67 | 0 | 66 |
| 2 | IKYNK | | | | | | | | | | |
| Dac g | NLALSIKYNK | 1 | 57 | 0 | 0 | >3 | 76 | 1 | 100 | 0 | 76 |
| 2 | EGDSM | | | | | | | | | | |
| Dac g | DIYNYMEPYV | 3 | 30 | >3 | N/A | >3 | 83 | >3 | 23 | >3 | 100 |
| 4 | SKVDP | | | | | | | | | | |
| Lol p | KASNPNYLAIL | 2 | | 3 | 80 | 3 | 12 | 2 | 100 | 0 | 100 |
| 1 | VKYV | | | | | | | | | | |
| Phl p | NFRFMSKGG | 0 | 51 | 0 | 56 | 0 | 3 | 0 | 68 | 2 | 57 |
| 3 | MRNVFD | | | | | | | | | | |
| Phl p | INVGFKAAVA | 0 | 14 | >3 | 5 | 2 | 17 | 0 | 23 | 2 | 30 |
| 5 | AAASV | | | | | | | | | | |
| Phl p | INVGFKAAVA | 0 | 1 | >3 | 0 | 2 | 0 | 0 | 13 | 2 | 9 |
| 5 | AAASV | | | | | | | | | | |
| Phl p | INVGFKAAVA | 0 | 44 | >3 | 35 | 2 | 3 | 0 | 72 | 2 | 60 |
| 5 | AAASV | | | | | | | | | | |
| Phl p | EEWEPLTKKG | 0 | 100 | 1 | 100 | 1 | 7 | 0 | 100 | 2 | 100 |
| 3 | NVWEV | | | | | | | | | | |
| Phl p | NVWEVKSSK | 0 | 100 | 2 | 100 | 2 | 4 | 0 | 100 | 2 | 100 |
| 3 | PLVGPF | | | | | | | | | | |
| Phl p | NVWEVKSSK | 0 | 45 | 2 | 32 | 2 | 10 | 0 | 58 | 2 | N/A |
| 3 | PLVGPF | | | | | | | | | | |
| Phl p | NVWEVKSSK | 0 | 25 | 2 | N/A | 2 | 4 | 0 | 55 | 2 | N/A |
| 3 | PLVGPF | | | | | | | | | | |
| Phl p | NVWEVKSSK | 0 | 77 | 2 | 98 | 2 | N/A | 0 | 100 | 2 | N/A |
| 3 | PLVGPF | | | | | | | | | | |
| Phl p | NVWEVKSSK | 0 | 6 | 2 | 4 | 2 | 7 | 0 | 12 | 2 | 1 |
| 3 | PLVGPF | | | | | | | | | | |
| Phl p | NVWEVKSSK | 0 | 10 | 2 | 49 | 2 | 19 | 0 | 37 | 2 | 41 |
| 3 | PLVGPF | | | | | | | | | | |
| Phl p | AFKVAATAAN | 0 | 53 | 2 | 88 | 0 | 9 | 0 | N/A | 2 | N/A |
| 5 | AAPAN | | | | | | | | | | |
| Phl p | AFKVAATAAN | 0 | 17 | 2 | 39 | 0 | 3 | 0 | N/A | 2 | N/A |
| 5 | AAPAN | | | | | | | | | | |
| Phl p | AFKVAATAAN | 0 | 100 | 2 | 100 | 0 | 3 | 0 | 100 | 2 | 100 |
| 5 | AAPAN | | | | | | | | | | |
| Phl p | AFKVAATAAN | 0 | 1 | 2 | 8 | 0 | 6 | 0 | 19 | 2 | 20 |
| 5 | AAPAN | | | | | | | | | | |
| Phl p | AFKVAATAAN | 0 | 30 | 2 | 45 | 0 | 16 | 0 | 59 | 2 | 62 |
| 5 | AAPAN | | | | | | | | | | |
| Phl p | STWYGKPTG | 0 | 32 | 1 | 51 | 1 | 1 | 0 | 44 | 0 | 64 |
| 1 | AGPKDN | | | | | | | | | | |
| Phl p | STWYGKPTG | 0 | 35 | 1 | 64 | 1 | N/A | 0 | 100 | 0 | N/A |
| 1 | AGPKDN | | | | | | | | | | |
| Phl p | STWYGKPTG | 0 | 5 | 1 | | 1 | 95 | 0 | 19 | 0 | 40 |
| 1 | AGPKDN | | | | | | | | | | |
| Phl p | SGIAFGSMAK | 0 | 10 | >3 | 15 | >3 | 73 | 3 | 58 | 2 | |
| 1 | KGDEQ | | | | | | | | | | |
| Phl p | SGIAFGSMAK | 0 | 3 | >3 | 11 | >3 | 1 | 3 | 14 | 2 | 6 |
| 1 | KGDEQ | | | | | | | | | | |
| Phl p | SGIAFGSMAK | 0 | 41 | >3 | 100 | >3 | 100 | 3 | 91 | 2 | 64 |
| 1 | KGDEQ | | | | | | | | | | |
| Phl p | SGIAFGSMAK | 0 | 43 | >3 | 100 | >3 | 8 | 3 | 100 | 2 | 38 |
| 1 | KGDEQ | | | | | | | | | | |
| Phl p | GELELQFRRV | 0 | 4 | 1 | 22 | 1 | 0 | 1 | 77 | 0 | 21 |
| 1 | KCKYP | | | | | | | | | | |
| Phl p | GELELQFRRV | 0 | 5 | 1 | 0 | 1 | 3 | 1 | 8 | 0 | 0 |
| 1 | KCKYP | | | | | | | | | | |
| Phl p | GELELQFRRV | 0 | 0 | 1 | 13 | 1 | 13 | 1 | 0 | 0 | 25 |
| 1 | KCKYP | | | | | | | | | | |
| Phl p | GELELQFRRV | 0 | 98 | 1 | 100 | 1 | 14 | 1 | 100 | 0 | 100 |
| 1 | KCKYP | | | | | | | | | | |
| Phl p | GELELQFRRV | 0 | 88 | 1 | 91 | 1 | 14 | 1 | 92 | 0 | 85 |
| 1 | KCKYP | | | | | | | | | | |
| Phl p | LAKYKANWIE | 0 | 6 | >3 | 14 | >3 | 47 | 2 | 22 | 2 | 33 |
| 13 | IMRIK | | | | | | | | | | |
| | | Weed | | | | Tree | | | | | |
| | | Amb p | | Pla l | | Ole e | | Que a | | Bet v | |
| | | | % | | % | | % | | % | | % |
| Anti- | | # of | Reac- | # of | Reac- | # of | Reac- | # of | Reac- | # of | Reac- |
| gen | Sequence | mm | tivity | mm | tivity | mm | tivity | mm | tivity | mm | tivity |
| NTGA | AVMLTFDNAG | 0 | 2 | 0 | 9 | 0 | 3 | 0 | 0 | 3 | 0 |
| 49 | MWNVR | | | | | | | | | | |
| NTGA | IGSFFYFPSIG | 2 | 0 | 1 | 2 | 1 | 1 | 2 | 1 | >3 | 2 |
| 54 | MQRT | | | | | | | | | | |
| NTGA | NPMTVFWSK | >3 | 0 | 2 | 0 | 2 | 0 | 2 | 0 | 3 | 0 |
| 76 | MAQSMT | | | | | | | | | | |
| NTGA | NGSQFFLCTA | 2 | 9 | 3 | 1 | 2 | 4 | 2 | 2 | 2 | 1 |
| 91 | KTAWL | | | | | | | | | | |
| NTGA | NGSQFFLCTA | 2 | 90 | 3 | 2 | 2 | 5 | 2 | 90 | 2 | 1 |
| 91 | KTAWL | | | | | | | | | | |
| NTGA | QYAKEIWGIT | >3 | 83 | >3 | 15 | >3 | 44 | >3 | 32 | >3 | 73 |
| 89 | ANPVP | | | | | | | | | | |
| NTGA | FPIVQRFLEGA | >3 | 4 | >3 | 1 | >3 | 4 | >3 | 0 | >3 | 5 |
| 2 | SSID | | | | | | | | | | |
| NTGA | FPIVQRFLEGA | >3 | 71 | >3 | 39 | >3 | 100 | >3 | 0 | >3 | 0 |
| 2 | SSID | | | | | | | | | | |
| Lol p | LIEKINAGFKA | >3 | 0 | 0 | 2 | >3 | 2 | 0 | 0 | >3 | 0 |
| 51 | AVAA | | | | | | | | | | |
| Lol p | LIEKINAGFKA | >3 | 11 | 0 | 15 | >3 | 12 | 0 | 3 | >3 | 9 |
| 51 | AVAA | | | | | | | | | | |
| Lol p | NAGFKAAVAA | >3 | 0 | 0 | 0 | >3 | 5 | 0 | 0 | >3 | 0 |
| 51 | AAVVP | | | | | | | | | | |
| Lol p | NAGFKAAVAA | >3 | 83 | 0 | 15 | >3 | 44 | 0 | 32 | >3 | 73 |
| 51 | AAVVP | | | | | | | | | | |
| Lol p | NAGFKAAVAA | >3 | 100 | 0 | 88 | >3 | 100 | 0 | 0 | >3 | 0 |
| 51 | AAVVP | | | | | | | | | | |
| Lol p | SDAKTLVLNI | 2 | 11 | 3 | 14 | 2 | 23 | 2 | 0 | >3 | 6 |
| 3 | KYTRP | | | | | | | | | | |
| Lol p | SDAKTLVLNI | 2 | 33 | 3 | 24 | 2 | 53 | 2 | 11 | >3 | 23 |
| 3 | KYTRP | | | | | | | | | | |
| Lol p | SDAKTLVLNI | 2 | 14 | 3 | 8 | 2 | 16 | 2 | 0 | >3 | 0 |
| 3 | KYTRP | | | | | | | | | | |
| Lol p | SDAKTLVLNI | 2 | 100 | 3 | 86 | 2 | 80 | 2 | 12 | >3 | 71 |
| 3 | KYTRP | | | | | | | | | | |
| Lol p | MRNVFDDVV | >3 | 56 | >3 | 81 | >3 | 66 | >3 | 28 | >3 | N/A |
| 2 | PADFKV | | | | | | | | | | |
| Lol p | MRNVFDDVV | >3 | 11 | >3 | 6 | >3 | 20 | >3 | 6 | >3 | 2 |
| 2 | PADFKV | | | | | | | | | | |
| Lol p | MRNVFDDVV | >3 | 2 | >3 | 1 | >3 | 9 | >3 | 2 | >3 | 3 |
| 2 | PADFKV | | | | | | | | | | |
| Lol p | MRNVFDDVV | >3 | 1 | >3 | 2 | >3 | 1 | >3 | 1 | >3 | 1 |
| 2 | PADFKV | | | | | | | | | | |
| Lol p | MRNVFDDVV | >3 | 55 | >3 | 25 | >3 | 25 | >3 | 0 | >3 | 0 |
| 2 | PADFKV | | | | | | | | | | |
| Lol p | NVFDEVIPTAF | 3 | 2 | 3 | 0 | 3 | 8 | 3 | 0 | >3 | 2 |
| 3 | TVGK | | | | | | | | | | |
| Lol p | NVFDEVIPTAF | 3 | 49 | 3 | 11 | 3 | 37 | 3 | 0 | >3 | 0 |
| 3 | TVGK | | | | | | | | | | |
| Lol p | DAYVATLTEA | >3 | 10 | 0 | 4 | 0 | 29 | 0 | 10 | >3 | 4 |
| 5 1 | LRVIA | | | | | | | | | | |
| Lol p | DAYVATLTEA | >3 | 23 | 0 | 18 | 0 | 62 | 0 | 8 | >3 | 26 |
| 5 1 | LRVIA | | | | | | | | | | |
| Lol p | DAYVATLTEA | >3 | 6 | 0 | 4 | 0 | 6 | 0 | 0 | >3 | 0 |
| 5 1 | LRVIA | | | | | | | | | | |
| Lol p | DAYVATLTEA | >3 | 8 | 0 | 8 | 0 | 5 | 0 | 0 | >3 | 0 |
| 5 1 | LRVIA | | | | | | | | | | |
| Lol p | AFKIAATAAN | >3 | 2 | >3 | 2 | 2 | 1 | 2 | 0 | >3 | 1 |
| 5 2 | AAPTN | | | | | | | | | | |
| Lol p | AFKIAATAAN | >3 | 24 | >3 | 9 | 2 | 35 | 2 | 4 | >3 | 0 |
| 5 2 | AAPTN | | | | | | | | | | |
| Lol p | AFKIAATAAN | >3 | 11 | >3 | 4 | 2 | 15 | 2 | 0 | >3 | 3 |
| 5 2 | AAPTN | | | | | | | | | | |
| Poa p | DINVGFKAAV | >3 | 1 | 3 | 0 | >3 | 2 | 3 | 2 | >3 | 0 |
| 1 | AAAAG | | | | | | | | | | |
| Poa p | DINVGFKAAV | >3 | 2 | 3 | 0 | >3 | 2 | 3 | 0 | >3 | 0 |
| 1 | AAAAG | | | | | | | | | | |
| Poa p | DINVGFKAAV | >3 | 2 | 3 | 3 | >3 | 11 | 3 | 0 | >3 | 2 |
| 1 | AAAAG | | | | | | | | | | |
| Poa p | DINVGFKAAV | >3 | 19 | 3 | 10 | >3 | 16 | 3 | 0 | >3 | 0 |
| 1 | AAAAG | | | | | | | | | | |
| Poa p | EPIAAYHFDLS | 1 | 1 | 1 | 1 | 1 | 2 | 1 | 0 | >3 | 0 |
| 1 | GKAF | | | | | | | | | | |
| Poa p | EPIAAYHFDLS | 1 | 19 | 1 | 17 | 1 | 52 | 1 | 2 | >3 | 0 |
| 1 | GKAF | | | | | | | | | | |
| Poa p | FKAAVAAAAG | >3 | 15 | 2 | 2 | >3 | 39 | 2 | 6 | >3 | 22 |
| 5 | APPAD | | | | | | | | | | |
| Dac g | GSDEKNLALS | >3 | 5 | >3 | 0 | >3 | 10 | >3 | 0 | >3 | 0 |
| 2 | IKYNK | | | | | | | | | | |
| Dac g | NLALSIKYNK | >3 | 76 | >3 | 41 | >3 | 78 | >3 | 0 | >3 | 0 |
| 2 | EGDSM | | | | | | | | | | |
| Dac g | DIYNYMEPYV | >3 | 37 | >3 | 17 | >3 | 82 | >3 | 0 | >3 | 0 |
| 4 | SKVDP | | | | | | | | | | |
| Lol p | KASNPNYLAIL | 3 | 12 | 0 | 6 | 0 | 41 | 0 | 2 | >3 | 4 |
| 1 | VKYV | | | | | | | | | | |
| Phl p | NFRFMSKGG | 0 | 6 | 0 | 0 | 0 | 6 | 0 | 0 | >3 | 0 |
| 3 | MRNVFD | | | | | | | | | | |
| Phl p | INVGFKAAVA | >3 | 39 | 2 | 0 | >3 | 19 | 2 | 0 | >3 | 1 |
| 5 | AAASV | | | | | | | | | | |
| Phl p | INVGFKAAVA | >3 | 0 | 2 | 0 | >3 | 0 | 2 | 0 | >3 | 0 |
| 5 | AAASV | | | | | | | | | | |
| Phl p | INVGFKAAVA | >3 | 14 | 2 | 9 | >3 | 13 | 2 | 2 | >3 | 1 |
| 5 | AAASV | | | | | | | | | | |
| Phl p | EEWEPLTKKG | 1 | 49 | 1 | 23 | 1 | 13 | 1 | 1 | >3 | 3 |
| 3 | NVWEV | | | | | | | | | | |
| Phl p | NVWEVKSSK | 2 | 0 | 2 | 1 | 2 | 4 | 2 | 0 | >3 | 1 |
| 3 | PLVGPF | | | | | | | | | | |
| Phl p | NVWEVKSSK | 2 | 10 | 2 | 0 | 2 | 3 | 2 | N/A | >3 | N/A |
| 3 | PLVGPF | | | | | | | | | | |
| Phl p | NVWEVKSSK | 2 | N/A | 2 | 8 | 2 | 6 | 2 | 3 | >3 | 2 |
| 3 | PLVGPF | | | | | | | | | | |
| Phl p | NVWEVKSSK | 2 | N/A | 2 | N/A | 2 | N/A | 2 | 15 | >3 | 5 |
| 3 | PLVGPF | | | | | | | | | | |
| Phl p | NVWEVKSSK | 2 | 9 | 2 | 7 | 2 | 1 | 2 | 1 | >3 | 4 |
| 3 | PLVGPF | | | | | | | | | | |
| Phl p | NVWEVKSSK | 2 | 39 | 2 | 12 | 2 | 15 | 2 | 0 | >3 | 0 |
| 3 | PLVGPF | | | | | | | | | | |
| Phl p | AFKVAATAAN | >3 | 0 | 3 | 0 | 0 | 3 | 0 | 0 | >3 | 0 |
| 5 | AAPAN | | | | | | | | | | |
| Phl p | AFKVAATAAN | >3 | 1 | 3 | 0 | 0 | 8 | 0 | 0 | >3 | 2 |
| 5 | AAPAN | | | | | | | | | | |
| Phl p | AFKVAATAAN | >3 | 5 | 3 | 16 | 0 | 16 | 0 | 3 | >3 | 3 |
| 5 | AAPAN | | | | | | | | | | |
| Phl p | AFKVAATAAN | 3 | 32 | 3 | 19 | 0 | 21 | 0 | 2 | >3 | 8 |
| 5 | AAPAN | | | | | | | | | | |
| Phl p | AFKVAATAAN | >3 | 5 | 3 | 13 | 0 | 3 | 0 | 0 | >3 | 3 |
| 5 | AAPAN | | | | | | | | | | |
| Phl p | STWYGKPTG | 1 | 3 | 1 | 1 | 1 | 1 | 0 | 1 | >3 | 0 |
| 1 | AGPKDN | | | | | | | | | | |
| Phl p | STWYGKPTG | 1 | N/A | 1 | 0 | 1 | 12 | 0 | N/A | 3 | N/A |
| 1 | AGPKDN | | | | | | | | | | |
| Phl p | STWYGKPTG | 1 | 100 | 1 | 71 | 1 | 100 | 0 | 0 | >3 | 0 |
| 1 | AGPKDN | | | | | | | | | | |
| Phl p | SGIAFGSMAK | 3 | 5 | 2 | 5 | >3 | 2 | 2 | 0 | >3 | 1 |
| 1 | KGDEQ | | | | | | | | | | |
| Phl p | SGIAFGSMAK | 3 | 2 | 2 | 1 | >3 | 1 | 2 | 0 | >3 | 0 |
| 1 | KGDEQ | | | | | | | | | | |
| Phl p | SGIAFGSMAK | 3 | 45 | 2 | 14 | >3 | 36 | 2 | 18 | >3 | 41 |
| 1 | KGDEQ | | | | | | | | | | |
| Phl p | SGIAFGSMAK | 3 | 20 | 2 | 4 | >3 | 16 | 2 | 5 | >3 | 3 |
| 1 | KGDEQ | | | | | | | | | | |
| Phl p | GELELQFRRV | 0 | 0 | 0 | 1 | 1 | 1 | 0 | 0 | >3 | 0 |
| 1 | KCKYP | | | | | | | | | | |
| Phl p | GELELQFRRV | 0 | 0 | 0 | 0 | 1 | 2 | 0 | 2 | 3 | 3 |
| 1 | KCKYP | | | | | | | | | | |
| Phl p | GELELQFRRV | 0 | 4 | 0 | 0 | 1 | 0 | 0 | 8 | 3 | 33 |
| 1 | KCKYP | | | | | | | | | | |
| Phl p | GELELQFRRV | 0 | 16 | 0 | 11 | 1 | 37 | 0 | 0 | 3 | 1 |
| 1 | KCKYP | | | | | | | | | | |
| Phl p | GELELQFRRV | 0 | 2 | 0 | 13 | 1 | 27 | 0 | 0 | 3 | 3 |
| 1 | KCKYP | | | | | | | | | | |
| Phl p | LAKYKANWIE | >3 | 83 | >3 | 11 | >3 | 17 | >3 | 0 | >3 | 22 |
| 13 | IMRIK | | | | | | | | | | |
| | | | | | | | | Tree | | | |
| | | | | | | | | Fra e | | Controls | |
| | | | | | | Anti- | | # of | % | Relevant | Irrelevant |
| | | | | | | gen | Sequence | mm | Reactivity | Pool | Pool |
| | | | | | | NTGA | AVMLTFDNAG | 0 | 0 | 100 | 0 |
| | | | | | | 49 | MWNVR | | | | |
| | | | | | | NTGA | IGSFFYFPSIG | 1 | 1 | 63 | 1 |
| | | | | | | 54 | MQRT | | | | |
| | | | | | | NTGA | NPMTVFWSK | 2 | 0 | 79 | 1 |
| | | | | | | 76 | MAQSMT | | | | |
| | | | | | | NTGA | NGSQFFLCTA | 2 | 3 | 100 | 0 |
| | | | | | | 91 | KTAWL | | | | |
| | | | | | | NTGA | NGSQFFLCTA | 2 | 0 | 89 | 23 |
| | | | | | | 91 | KTAWL | | | | |
| | | | | | | NTGA | QYAKEIWGIT | >3 | 12 | 100 | 7 |
| | | | | | | 89 | ANPVP | | | | |
| | | | | | | NTGA | FPIVQRFLEGA | >3 | 1 | 16 | 100 |
| | | | | | | 2 | SSID | | | | |
| | | | | | | NTGA | FPIVQRFLEGA | >3 | 100 | 0 | 100 |
| | | | | | | 2 | SSID | | | | |
| | | | | | | Lol p | LIEKINAGFKA | >3 | 2 | 83 | 14 |
| | | | | | | 51 | AVAA | | | | |
| | | | | | | Lol p | LIEKINAGFKA | >3 | 15 | 90 | 20 |
| | | | | | | 51 | AVAA | | | | |
| | | | | | | Lol p | NAGFKAAVAA | >3 | 1 | 77 | 0 |
| | | | | | | 51 | AAVVP | | | | |
| | | | | | | Lol p | NAGFKAAVAA | >3 | 12 | 100 | 7 |
| | | | | | | 51 | AAVVP | | | | |
| | | | | | | Lol p | NAGFKAAVAA | >3 | 0 | 100 | 0 |
| | | | | | | 51 | AAVVP | | | | |
| | | | | | | Lol p | SDAKTLVLNI | 3 | 21 | 88 | 0 |
| | | | | | | 3 | KYTRP | | | | |
| | | | | | | Lol p | SDAKTLVLNI | 3 | 43 | 100 | 30 |
| | | | | | | 3 | KYTRP | | | | |
| | | | | | | Lol p | SDAKTLVLNI | 3 | 4 | 81 | 4 |
| | | | | | | 3 | KYTRP | | | | |
| | | | | | | Lol p | SDAKTLVLNI | 3 | 93 | 80 | 37 |
| | | | | | | 3 | KYTRP | | | | |
| | | | | | | Lol p | MRNVFDDVV | >3 | N/A | 81 | 22 |
| | | | | | | 2 | PADFKV | | | | |
| | | | | | | Lol p | MRNVFDDVV | >3 | 18 | 94 | 6 |
| | | | | | | 2 | PADFKV | | | | |
| | | | | | | Lol p | MRNVFDDVV | >3 | 2 | 98 | 4 |
| | | | | | | 2 | PADFKV | | | | |
| | | | | | | Lol p | MRNVFDDVV | >3 | 4 | 100 | 1 |
| | | | | | | 2 | PADFKV | | | | |
| | | | | | | Lol p | MRNVFDDVV | >3 | 0 | 100 | 0 |
| | | | | | | 2 | PADFKV | | | | |
| | | | | | | Lol p | NVFDEVIPTAF | 3 | 4 | 100 | 17 |
| | | | | | | 3 | TVGK | | | | |
| | | | | | | Lol p | NVFDEVIPTAF | 3 | 55 | 100 | 28 |
| | | | | | | 3 | TVGK | | | | |
| | | | | | | Lol p | DAYVATLTEA | 0 | 12 | 100 | 49 |
| | | | | | | 5 1 | LRVIA | | | | |
| | | | | | | Lol p | DAYVATLTEA | 0 | 1 | 96 | 46 |
| | | | | | | 5 1 | LRVIA | | | | |
| | | | | | | Lol p | DAYVATLTEA | 0 | 3 | 67 | 0 |
| | | | | | | 5 1 | LRVIA | | | | |
| | | | | | | Lol p | DAYVATLTEA | 0 | 0 | 100 | 4 |
| | | | | | | 5 1 | LRVIA | | | | |
| | | | | | | Lol p | AFKIAATAAN | 2 | 3 | 44 | 2 |
| | | | | | | 5 2 | AAPTN | | | | |
| | | | | | | Lol p | AFKIAATAAN | 2 | 28 | 100 | 20 |
| | | | | | | 5 2 | AAPTN | | | | |
| | | | | | | Lol p | AFKIAATAAN | 2 | 21 | 100 | 22 |
| | | | | | | 5 2 | AAPTN | | | | |
| | | | | | | Poa p | DINVGFKAAV | >3 | 0 | 53 | 5 |
| | | | | | | 1 | AAAAG | | | | |
| | | | | | | Poa p | DINVGFKAAV | >3 | 0 | 100 | 1 |
| | | | | | | 1 | AAAAG | | | | |
| | | | | | | Poa p | DINVGFKAAV | >3 | 4 | 95 | 15 |
| | | | | | | 1 | AAAAG | | | | |
| | | | | | | Poa p | DINVGFKAAV | >3 | 1 | 100 | 2 |
| | | | | | | 1 | AAAAG | | | | |
| | | | | | | Poa p | EPIAAYHFDLS | 1 | 0 | 95 | 11 |
| | | | | | | 1 | GKAF | | | | |
| | | | | | | Poa p | EPIAAYHFDLS | 1 | 0 | 68 | 2 |
| | | | | | | 1 | GKAF | | | | |
| | | | | | | Poa p | FKAAVAAAAG | >3 | 38 | 100 | 23 |
| | | | | | | 5 | APPAD | | | | |
| | | | | | | Dac g | GSDEKNLALS | >3 | 4 | 87 | 19 |
| | | | | | | 2 | IKYNK | | | | |
| | | | | | | Dac g | NLALSIKYNK | >3 | 0 | 100 | 0 |
| | | | | | | 2 | EGDSM | | | | |
| | | | | | | Dac g | DIYNYMEPYV | >3 | 49 | 100 | 49 |
| | | | | | | 4 | SKVDP | | | | |
| | | | | | | Lol p | KASNPNYLAIL | 0 | 12 | 92 | 12 |
| | | | | | | 1 | VKYV | | | | |
| | | | | | | Phl p | NFRFMSKGG | 0 | 3 | 100 | 15 |
| | | | | | | 3 | MRNVFD | | | | |
| | | | | | | Phl p | INVGFKAAVA | >3 | 2 | 100 | 4 |
| | | | | | | 5 | AAASV | | | | |
| | | | | | | Phl p | INVGFKAAVA | >3 | 0 | 70 | 3 |
| | | | | | | 5 | AAASV | | | | |
| | | | | | | Phl p | INVGFKAAVA | >3 | 21 | 60 | 0 |
| | | | | | | 5 | AAASV | | | | |
| | | | | | | Phl p | EEWEPLTKKG | 1 | 76 | 100 | 32 |
| | | | | | | 3 | NVWEV | | | | |
| | | | | | | Phl p | NVWEVKSSK | 2 | 0 | 100 | 3 |
| | | | | | | 3 | PLVGPF | | | | |
| | | | | | | Phl p | NVWEVKSSK | 2 | N/A | 100 | 0 |
| | | | | | | 3 | PLVGPF | | | | |
| | | | | | | Phl p | NVWEVKSSK | 2 | N/A | 68 | 1 |
| | | | | | | 3 | PLVGPF | | | | |
| | | | | | | Phl p | NVWEVKSSK | 2 | N/A | 100 | 1 |
| | | | | | | 3 | PLVGPF | | | | |
| | | | | | | Phl p | NVWEVKSSK | 2 | 0 | 94 | 3 |
| | | | | | | 3 | PLVGPF | | | | |
| | | | | | | Phl p | NVWEVKSSK | 2 | 0 | 100 | 1 |
| | | | | | | 3 | PLVGPF | | | | |
| | | | | | | Phl p | AFKVAATAAN | 0 | N/A | 100 | 0 |
| | | | | | | 5 | AAPAN | | | | |
| | | | | | | Phl p | AFKVAATAAN | 0 | N/A | 100 | 1 |
| | | | | | | 5 | AAPAN | | | | |
| | | | | | | Phl p | AFKVAATAAN | 0 | 0 | 100 | 13 |
| | | | | | | 5 | AAPAN | | | | |
| | | | | | | Phl p | AFKVAATAAN | 0 | 13 | 99 | 13 |
| | | | | | | 5 | AAPAN | | | | |
| | | | | | | Phl p | AFKVAATAAN | 0 | 27 | 100 | 22 |
| | | | | | | 5 | AAPAN | | | | |
| | | | | | | Phl p | STWYGKPTG | 1 | 1 | 57 | 0 |
| | | | | | | 1 | AGPKDN | | | | |
| | | | | | | Phl p | STWYGKPTG | 1 | N/A | 25 | 1 |
| | | | | | | 1 | AGPKDN | | | | |
| | | | | | | Phl p | STWYGKPTG | 1 | 0 | 17 | 16 |
| | | | | | | 1 | AGPKDN | | | | |
| | | | | | | Phl p | SGIAFGSMAK | 2 | 2 | 26 | 0 |
| | | | | | | 1 | KGDEQ | | | | |
| | | | | | | Phl p | SGIAFGSMAK | 2 | 0 | 24 | 1 |
| | | | | | | 1 | KGDEQ | | | | |
| | | | | | | Phl p | SGIAFGSMAK | 2 | 0 | 100 | 23 |
| | | | | | | 1 | KGDEQ | | | | |
| | | | | | | Phl p | SGIAFGSMAK | 2 | 11 | 100 | 25 |
| | | | | | | 1 | KGDEQ | | | | |
| | | | | | | Phl p | GELELQFRRV | 0 | 1 | 88 | 0 |
| | | | | | | 1 | KCKYP | | | | |
| | | | | | | Phl p | GELELQFRRV | 0 | 0 | 53 | 2 |
| | | | | | | 1 | KCKYP | | | | |
| | | | | | | Phl p | GELELQFRRV | 0 | 46 | 92 | 0 |
| | | | | | | 1 | KCKYP | | | | |
| | | | | | | Phl p | GELELQFRRV | 0 | 5 | 100 | 0 |
| | | | | | | 1 | KCKYP | | | | |
| | | | | | | Phl p | GELELQFRRV | 0 | 12 | 100 | 8 |
| | | | | | | 1 | KCKYP | | | | |
| | | | | | | Phl p | LAKYKANWIE | 2 | 14 | 31 | 19 |
| | | | | | | 13 | IMRIK | | | | |

[0250] Table 10 shows individual peptide data for the cross reactivity experiments. Each peptide was used to stimulate cells and cross reactivity was tested for extracts from each pollen species. The number of mismatches (# of mm) for each peptide compared to the pollen species and the reactivity of the extracts as a percentage of the reactivity compared to the peptide are shown. Peptides are SEQ ID NO's 246, 258, 315, 1110-1177 in order of appearance, e.g. peptide NGSQFFLCTAKTAWL of NTGA 91 has SEQ ID NO: 1110.

### EXAMPLES

### Example 1

[0251] This example includes a description of transcriptomic analysis of various pollen species and conservation analysis.

[0252] A set of 93 proteins from Timothy grass (TG) pollen and the assembly of 822 peptides (15 mers) predicted to promiscuously bind HLA class II molecules shown in Table 9 and the immune reactivity in allergic donors have been reported in PCT application WO 2013/119863. Promiscuous binders were determined by predicting the binding affinity to a panel of 25 HLA class II molecules using a consensus prediction approach (Wang P, et al. (2008) and Wang P, et al. (2010). Peptides with predicted binding scores in the top 20% for a given allele were considered potential binders. Peptides predicted to bind 13 or more of the HLA molecules in Table 9 at this threshold were considered promiscuous binders, and selected for synthesis (after eliminating peptides overlapping by more than 9 contiguous residues). If less than 5 peptides from a given protein met this threshold, the top 5 peptides were chosen, and up to 4 peptides in proteins where length was prohibitive. In total, this resulted in the selection of 822 TG peptides from a total of 21,506 distinct 15-mers encoded in 620 ORFs derived from the transcriptomic analysis. Immune reactivity was determined by the production of IL-5 or IFNg from cultured PBMCs of the allergic donors in response to stimulation with a peptide and IL-5 and IFNg were measured by ELISPOT as described in Oseroff C et al, 2010.

[0253] In short, T cell immune reactivity was determined using PBMCs isolated from study participants and stored in liquid nitrogen until further use. For experimental testing, PBMCs were thawed and expanded in vitro with TG pollen extract (50 μg/mL) or the peptide pool (5 pg/mL). The TG extract and peptide pools had each been previously titrated to determine optimal stimulation concentrations.

[0254] Cytokine production by cultured PBMCs in response to antigen stimulation was measured by ELISPOT. Cells (1×10⁵ cells/well) were plated and incubated with peptide (10 μg/mL), the peptide pool (5 μg/mL), or the TG extract (50 μg/mL). Phytohaemagglutinin (10 μg/mL) and medium alone were used as positive and negative controls, respectively. Samples were considered to produce a cytokine if 100 spot-forming cells (SFCs)/10⁶ PBMCs were detected, with P .05 and a stimulation index of 2 or more. Criteria for individual peptides were the same except that a minimum of 20 SFCs were required for a sample to be counted as positive.

[0255] To study the conservation of the 822 TG peptides in other pollen species, RNA-sequencing were performed on pollen samples of four additional grass pollen species (Kentucky blue grass (Poa pratensis, Poa p), Sweet vernal grass (Anthoxanthum odoratum, Ant o), Rye grass (Lollium Perenne, Lol p), Bermuda grass (Cynodon dactylon, Cyn d)) and five non-grass pollen species (Western ragweed (Ambrosia psilostachya, Amb p), Short ragweed (Ambrosia artemisiifolia, Amb a), White oak (Quercus alba, Que a), European white birch (Betula verrucosa, Bet v), European Ash (Fraxinus Excelsior Fra e), European Olive (Olea Europaea, Ole e), English plantain (Plantago lanceolata Pla I),). RNA-seq was run at UCSD, using an Illumina HiSeq 2000. RNA-seq was run at UCSD, using an Illumina HiSeq 2000. The table below shows the number of reads assembled for each of the different pollens (top), with over 500 million reads over two replicate runs per allergen. Sequences were assembled into transcripts using Trinity (bottom), resulting in over 50 thousand transcripts per allergen with minimum lengths of 200 nucleotides. The transcripts include related variants, such as isoforms, and homologs.

[0256] Sequencing was performed on an Illumina Genome Analyzerllx (GAIIx). Briefly, adaptor-ligated cDNA was loaded into an Illumina flow cell. DNA was then bridge-amplified within the flow cell to generate millions of DNA clusters by using specific reagents and enzymes (Illumina Paired-End Cluster Generation Kit). The flow cell was loaded onto the GAIIx equipped with a paired-end module, and 72 sequencing cycles were performed to generate sequence in both directions by using Illumina Sequencing Kit v4. Replicate samples were run in seven of the eight lanes on the flow cell, producing 280 million raw sequence reads of 72 by in length. Reads went through several preprocessing steps using the FastX toolkit (2) before they were assembled into contigs: (i) the 3′ terminal base was removed; (ii) low-complexity reads were removed; (iii) portions of reads downstream of a low-quality score were removed; and (iv) portions of reads corresponding to adapter sequencers were removed. The remaining reads were assembled into contigs by using Velvet (Version 1.0.15) (3). Because of the excessive memory requirements inherent to de novo sequence assembly, the reads for each lane were considered separately and were each run with five different values for the word size parameter (k=21, 23, 25, 27, 29). We and others (4) have observed that different sets of contigs are obtained for each value for k. The contigs were further merged with Oases (Version 0.18.1; D. R. Zerbino, European Bio-informatics Institute, Hinxton, United Kingdom) into putative transcripts.

[0257] Table showing pollen RNA-seq reads for various pollen species

Grass Pollen Species
Raw read counts (millions)

| | Sweet vernal | Bermuda | Rye | Kentucky |
|---|---|---|---|---|
| | grass | grass | grass | blue grass |
| | Ant o | Cyn d | Lpl p | Poa p |
| 1st run | 394 | 354 | 332 | 363 |
| 2nd run | 360 | 309 | 319 | 309 |
| Total | 754 | 663 | 651 | 672 |

Transcripts after Trinity assembly

| | | | | |
|---|---|---|---|---|
| Count | 317,874 | 112,527 | 122,266 | 128,174 |
| min length | 201 | 201 | 201 | 201 |
| median length | 544 | 842 | 631 | 635 |
| max length | 11,515 | 14,364 | 9,631 | 10,100 |

Non-grass pollen species
Raw read counts (millions)

| | Short | Western | European | European | English | White |
|---|---|---|---|---|---|---|
| | Ragweed | ragweed | Ash | Olive | plantain | Oak |
| | Amb a | Amp p | Fra e | Ole e | Pla a | Que |
| 1st run | 528 | 328 | 410 | 385 | 303 | 329 |
| 2nd run | | 299 | 346 | 350 | 287 | 307 |
| Total | 528 | 627 | 756 | 735 | 590 | 635 |

Transcripts after Trinity assembly

| | | | | | | |
|---|---|---|---|---|---|---|
| count | 95,759 | 121,659 | 81,401 | 74,333 | 57,102 | 54,280 |
| min length | 201 | 201 | 201 | 201 | 201 | 201 |
| median length | 352 | 390 | 722 | 710 | 696 | 634 |
| max length | 10975 | 8,325 | 9,838 | 8,133 | 8,090 | 14,807 |

### Example 2

[0258] This example includes a description of how to identify which of the TG peptides that are conserved across a grass pollen and various non-grass pollen species.

[0259] The degree of conservation of the known 15-mer peptides deriving from TG pollen proteins was determined across the different pollens. For the purpose of this analysis, peptides that have a homologous hit with 0, 1 or 2 mismatches are considered as being conserved. Any substitution of an amino acid sequence within the 15mer TG peptide is considered to constitute a mismatch. All 15mer peptides (overlapping by 10 aa) of the representative/construct sequence were created in silico and compared against the protein sequences of non-TG species. All peptides with 2 or less mismatches to the TG construct peptides were run through the IEDB MHC class II peptide binding predictor for 20 common class II alleles.

[0260] In total 499 of the 822 TG peptides have a mismatch of less than 3 (0, 1, or 2 mismatces) to a homologous peptide in another grass pollen species. A fraction (397 peptides) of the 499 TG peptides had a mismatch of less than 3 to a homologous peptide in at least one of the non-grass pollen species (Amb p, Ole e, Pla I, Fra e and Que e), these peptides for the purpose of this application are named “pan-grass plus” peptides (PG+) and are conserved across each of the grass pollen species investigated and at least to one non-grass pollen species with less than 3 mismatches compared to the PG+ sequence. A fraction (224 peptides) of the 397 peptides had a mismatch of less than 3 to a corresponding peptide found in each of the non-grass species investigated, these peptides for the purpose of this application are named “pan-pollen” peptides (PP peptides).

[0261] Table 3 lists the 397 PG+ peptides and indicates for each non-grass pollen species whether a matching peptide with either less than 3, less than 2 or zero mismatches could be detected. The immune reactivity of the TG peptide was assessed as the number of TG grass allergic donors (n=20) having in vitro T cell response against the TG peptide.

### Example 3

[0262] This example includes a description of how to identify PG+ peptides having high correlation between immune reactivity and conservation across grass and non-grass pollen species.

[0263] Some PG+ peptides were conserved across several grass pollen and non-grass pollen species and produced a T cell response in a higher fraction of the donors. For example, PG+ peptides recognized by two or more grass allergic donors (n=20), i.e. NTGA's numbered 2, 6, 7, 24, 49/54, 89 and 91 (Table 7).

[0264] Furthermore, some highly conserved PG+ peptides produce high immune reactivity (high SFC counts in ELISPOT). Those peptides are derived from NTGA's numbered 2, 6, 7, 22, 24, 27, 49, and 90.

[0265] The degree of conservation of 36 peptides for which there was found 3 or more donors reacting to T cells (either for IFN-g or for IL-5) was determined. On average, these peptides were found conserved in 6.6±0.43 (average ±standard error of the mean) pollen species in addition to Timothy grass (Phl p). In contrast, peptides that were unreactive in all donors were found to be conserved in only 2.3±0.11 other pollen species. This shows that conservation and immune reactivity most likely are correlated.

### Example 4

[0266] This example includes a description of proteins with high number of conserved peptides.

[0267] Tables 5 and 6 shows NTGAs ranked according to the number of PG+ peptides or PP peptides contained in the NTGA sequence. For example it was found that NTGA's containing at least 5 PG+ peptides conserved across grass, weed and tree pollen (GWT) were proteins numbered 1, 2, 4, 5, 6, 7, 13, 20, 21, 22, 24, 26, 30, 32, 34, 36, 39, 42, 72, 77, 83, 84, 86, 39/59, 49/54, 86/51 (Table 5) and those containing at least 8 PG+ peptides conserved across grass, weed and tree pollen (GWT) were proteins numbered 1, 2, 4, 5, 6, 7, 13, 24, 30, 34, 72, 83, 86, 39/59, 49/54, 86/51. The top 20 list of NTGAs ranked according to their number of PG+ peptides are NTGA's numbered 6, 89, 30, 1, 72, 2, 13, 83, 86, 77, 4, 24, 34, 7, 29, 76, 20, 59, 84, 49/54.

[0268] Table 6 shows the proteins ranked according to the number of PP peptides contained in the NTGA. The top 20 list of pan-pollen NTGA's ranked according to the number of PP peptides are NTGA's numbered 30, 86, 6, 13, 72, 4, 2, 24, 26, 49/54, 34, 7, 77, 83, 32, 42, 21, 22, 84. A fraction of those proteins contains highly T cell reactive sequences (2, 6, 7 and 53).

### Example 5

[0269] This example includes a description of the full length sequences of NTGA's and their homologs in other pollen species.

[0270] Full length sequence of NTGA's were assembled using multiple sequence alignments of transcripts from the different pollens, thereby identifying with more confidence the full length sequence of selected antigens of interest based on conserved start- and stop-codons. For example this made it possible to distinguish between multiple variants of TG transcripts identified in the initial assembly, and then pick high confidence candidate sequences that are starting points for protein synthesis.

[0271] In order to identify the correct coding region of each transcript, there was identified the closest homologous sequence in the rice (Oryza sativa japonica) proteome (via Blast). Rice was chosen since it is a species closely related to Timothy grass with a completely sequenced and annotated genome. Homologous rice sequences were identified for 180 Timothy grass sequences. Subsequently, homologous sequences were identified (via Blast) in the translated transcriptomes of Cyn d, Amb a, Amb p, Que a, and Bet v. of all identified sequences, the one(s) sharing the largest number of conserved peptides with the Phl p sequence was selected as homolog. In addition, there was found evidence of the presence of the NTGA's upon extracting pollen in a buffered aqueous solution for at least 2 hours hours and detecting the NTGA's by mass spectrometry analysis of the trypsin-treated extract and comparing mass signals to protein databases. Table 2 shows Phl p amino acid sequences of the identified NTGA's in Phl p grass pollen and Table 4 shows amino acid sequences of proteins with high identity and similarity to the Phl p sequence that are found in non-grass pollen species or in grass pollen species other than Phl p.

[0272] During the work with assembling the full length sequences it was found that PG+ peptides of NTGA's 5 and 64 derives from the same full length sequence, thus hereinafter named NTGA 5/64. Likewise, PG+ peptides of NTGA's 86 and 51 derive from the same full length sequence, and the full length protein is hereinafter named 86/51. PG peptides of NTGA's 49 and 54 derive from the same full length sequence, thus hereinafter named NTGA 49/54. PG+ peptides of NTGA's 39 and 59 derive from the same full length sequence, thus hereinafter named NTGA 39/59.

### Example 6

[0273] This example includes a description of the identification of conserved regions of NTGA's of Table 2 across homologs thereof shown in Table 4.

[0274] Multiple sequence alignments were generated for each set of homologous sequences. For each Phl p reference sequence (e.g. NTGA 6 disclosed in Table 2), the degree of conservation of each 15 mer peptide contained in this sequence across the other species was determined. For the purpose of this analysis, it was defined that peptides that have a homologous hit with 0, 1 or 2 mismatches are considered as being conserved. Any substitution of an amino acid sequence within the 15 mer Phl p peptide is considered to constitute a mismatch. A conserved region (e.g. conserved stretch) was then defined as the region resulting from merging all conserved 15 mer peptides in a Phl p sequence.

[0275] A region was defined as conserved across “grass & weed & tree” if conserved across at least one weed species (Ambrosia artemisiifolia and/or Ambrosia psilostachya) and at least across one tree species (Quercus alba and/or Betula verrucosa). Table 3 shows for each NTGA tested, the amino acid sequences of the conserved regions found across “grass & weed & tree” (GWT sequences) .

### Example 7

[0276] This example includes a description of how to examine release patterns of immunogens from pollen (Screening for co-release of NTGA's with major allergens from various pollen species) and detecting polypeptides of the invention by Mass Spectrometry

[0277] Raw pollen or defatted pollen of various pollen sources, Glass bottles (100 ml) for extraction, PD-10 columns with PE bed support combined with 10 ml syringe with silicone tubing, PBS buffer, pH 7.2 containing the following salts:

| | | M_{w} | Conc. | Conc. |
|---|---|---|---|---|
| Salt | | (g/mol) | g/L | mM |
| Sodium chloride | NaCl | 58.44 | 8.0 | 137 |
| Potassium chloride | KCl | 74.55 | 0.2 | 2.7 |
| Na-phosphate | Na₂HPO₄, 2H₂O | 175.98 | 1.44 | 8.2 |
| K-phosphate | KH₂PO₄ | 136.09 | 0.2 | 1.5 |

Phosphate conc.: 8.2 + 1.5 = 9.7 mM phosphate
NaCl: μ = ½ * (137 * 12 + 137 * 12) = 137 mM
KCl: μ = ½ * (2.7 * 12 + 2.7 * 12) = 2.7 mM
Na2HPO4: μ = ½ * ((8.2 * 2 * 12) + (8.2 * 22)) = 24.6 mM
KH2PO4: μ = ½ * ((1.5 * 12) + (1.5 * 12)) = 1.5 mM
Total ionic strength: μ = 165.8 mM ≈ 0.17 M

[0278] Extraction Procedure (at room temperature, 21-24° C.):

[0279] 5.0 g of pollen are weighed into a glass bottle and 50 ml of PBS is added and the bottle is immediately rotated, first 5 minutes by hand and thereafter rotated in a sample rotator during the entire extraction.

[0280] 5 ml of slurry is taken out after 20 sec, transferred to a column with a bed filter and dragged through the filter with a syringe. The syringe is immediately transferred to a filter unit and the extract is pushed through the combined filters into a labelled test tube. The tube is stored in an ice bath until the sample is pipetted in aliquots for further analysis and frozen. About 5 ml of the suspension is taken out at various time points.

[0281] Samples are analysed for NTGA and major allergens by MS (Mass Spectrometry) using the following materials and methods:

[0282] Buffers/solutions for reduction, alkylation and digestion of the sample:

[0283] Sample buffer: 8 M urea in 0.4 M NH₄HCO₃

[0284] DTT (45 mM): Make it fresh from the frozen stock 1.0 M: 45 μl 1 M DTT+955 μl water Iodoacetamide (IAA): Make fresh solution, Iodoacetamid 100 mM,

[0285] Trypsin: Sigma T6567, Dissolve one vial in 20 μl of 1 mM HCl. This results in a solution containing 1 μg/μl trypsin. After reconstitution in 1 mM HCl frozen aliquots can be stored for up to 4 weeks.

[0286] Enzymatic digestion with trypsin in solution for mass spectrometry: Dilute the dried sample in 5 μl of water, add 15 μl of sample buffer (8 M Urea in 0.4 M NH₄HCO₃), add 5 μl 45 mM DTT, incubate at 56° C. for 15 min, cool it to room temperature, add 5 μl of 100 mM Iodoacetamide, incubate in the dark in room temperature for 15 min, add 90 μl of water to lower the concentration of urea <1-2 M, add 1 μg trypsin, incubate at 37° C. over night.

[0287] Chromatography: Reverse phase chromatography (Ultimate 3000 HPLC, Dionex) was performed using a C18 pre- and analytical column. The eluting peptides were sprayed directly into an ESI-QTOF mass spectrometer (MaXis, Bruker). After washing the trap column with 0.05% v/v formic acid for 5 min with a flow rate of 30 μl/min, the peptides were eluted with an acetonitrile gradient at a flow rate of 2 μl/min using solvent A: 0.05% v/v formic acid and solvent B: 80% v/v acetonitrile/0.04% v/v formic acid and the gradient: 4-50% B in 200 minutes; 50-80% B in10 minutes; 100% B in 10 min, 4% B in 5 min.

[0288] Spectra were acquired in the mass range 50-2599 m/z and a spectra rate of 1.5 Hz. The instrument was tuned and calibrated using ESI-L Low concentration Tunning Mix from Agilent Technology.

[0289] Data acquisition and instrument control were carried out with Bruker Compass HyStar 3.2. Data processing was performed using DataAnalysis 4.0 (Bruker). Protein identification was performed using the program Biotools3.2 (Bruker) and two different data bases, i.e. Swiss prot and NCBInr. The MS/MS data sets for the tryptic digest were analysed using the following parameters; peptide tolerance 10 ppm and fragment tolerance 0.05 Da.

[0290] Procedure: The extraction samples were all evaporated (50 μl) and re-suspended in 5 μl of water. The sample is then reduced, alkylated and digested with trypsin. Resulting peptides are separated and identified by reversed phase chromatography followed by MS/MS.

[0291] Results: The release of major allergens from the various pollen species investigated is initiated almost instantly after hydration of pollen with buffer and the release continues with high rate within a time range of at least 30 to 60 minutes (data not shown). Table 5 shows which NTGA's and the Amb a homolog thereof that starts release within a period overlapping with the release of major allergens from grass pollen (Phl p) and weed pollen (Amb a), respectively (GW release). Likewise, the NTGAs and its Que a homolog that starts release within 30 minutes from grass pollen (Phl p) and tree pollen (Que a) is also shown (GT release). Finally, NTGA's or its Amb a and its Que a homolog released from grass pollen (Phl p) and weed pollen (Amb a) and tree pollen (Que a) is also shown (GWT release).

[0292] It was found that at least the NTGA's 1, 4, 6, 7, 24, 26, 29, 30, 39, 47, 51, 59, 64, 86, 91, 5/64, 39/59, 51/86 start release within 30 minutes from Phl p grass pollen and the corresponding Amb a homolog starts release within 30 minutes from Amb a pollen after hydration. At least NTGA's 24, 29, 56, 91 start release within 30 minutes from Phl p grass pollen and the corresponding Que a homolog starts release within 30 minutes from Que a pollen after hydration. At least NTGA's 24, 29 and 91 start release within 30 minutes from Phl p grass pollen as well as weed pollen (Amb a) and Oak pollen (Que a). I was also found that the release of NTGA's 1, 3, 4, 6, 5/64, 20, 24, 26, 30, 39/59, 47, 62, 76, 86/51, 89 and 91 was started within 30 minutes from both Phl p grass pollen and Cyn d pollen. NTGA's 8, 9, 10, 19, 22, 32, 34, 40, 42, 43, 54, 65 and 77 has not been tested.

### Example 8

[0293] This example describes how to determine that T cells responding to a particular PG+ peptide (Phl p sequence) also recognizes a sequence of a corresponding peptide identified in a non-grass pollen species.

[0294] PBMCs from Phl p reactive donors were expanded with individual PG+ peptides as well as peptides derived from major allergens of Phl p for 14 days (peptides shown in Table 10). For each peptide, the mismatch to a corresponding sequence in a non-grass pollen species or a pollen species other than Phl p were determined. Cytokine IL-5 responses were measured in response to the peptide itself, Phl p extract and extracts of the other pollen species. Reponses to extracts and peptide pools were expressed as the relative fraction of the response to the peptide itself and plotted as a function of conservation of the peptide in the different extracts (FIG. 1). The data points for each peptide are contained in Table 10. A clear hierarchy of responses was observed, with non-Phl p extracts in which the peptide is completely conserved (zero mismatches) showing the highest response, followed by non-Phl p extracts with 1-2 mismatches, and lowest responses with non-Phl p extracts with 3 or more mismatches. The exact same hierarchy was observed when analyzing peptides from the major allergens and the NTGA-derived peptides separately. Thus, Phl p epitopes conserved in other pollen species, including pollen of Amb a and Que a and other non-grass pollen, were indeed able to induce cross-reactive T cell immune responses.

### Example 9

[0295] This example describes how to determine the ability of a NTGA or a corresponding sequence found in a non-grass pollen species to relieve an allergic immune response in mice.

[0296] Initially, the sensitization pattern of an immunogen of the invention (NTGA 86/51) was investigated in BALB/c mice sensitized to Phl p extract (FIG. 2). For the purposes of these studies, the immunogen were expressed in E. Coli using standard expression protocols.

[0297] Initially, the sensitization pattern of an immunogen of the invention (NTGA 86/51) was investigated in BALB/c mice sensitized to Phl p extract (FIG. 2). For the purposes of these studies, the immunogen were expressed in E. Coli using standard expression protocols.

[0298] Mice were sensitized by one intraperitoneal injection with Phl p extract adsorbed to aluminium hydroxide. Eleven days later the mice were euthanized and splenocytes were stimulated in vitro with Phl p extract, Phl p 1, Phl p 5, NTGA 86/51. The cells were incubated for 6 days at 37° C. under 5% CO2 and incorporated 3H-thymidine was counted and used as a measure for T cell proliferation.

[0299] The results show that the in vitro T-cell response towards NTGA 86/51 is much weaker compared to the response to Phl p 5. This correlates well with the human situation, where Phl p 5 is considered to be a major T-cell allergen. In line with this, the results also show that the response towards NTGA 86/51 is much weaker compared to the response towards the Phl p extract that was used for intraperitoneal sensitization.

[0300] Then the tolerance induction of NTGA 86/51 was investigated in a prophylactic mice model using sublingual administration (FIG. 3)

[0301] The ability of NTGA 86/51 and NTGA 6 to induce prophylactic tolerance was investigated by SLIT treating naive BALB/c mice with NTGA 86/51 or NTGA 6 for two weeks (Monday-Friday) followed by one Phl p extract sensitization or sensitization to the immunogen itself (NTGA 86/51 or NTGA 6) as described above. Eleven days after the sensitization, splenocytes were harvested and stimulated in vitro with NTGA 86/51 as well as Phl p extract.

[0302] The result is presented in FIGS. 3A-C and show that prophylactic SLIT treatment with NTGA 86/51 is capable of inducing tolerance towards itself (3A) as well as towards the Phl p extract (3B), as shown by the reduced proliferation in splenocytes from the NTGA 86/51-treated mice compared to Buffer (sham) treated mice. In addition, it was shown that NTGA 6 is capable of inducing tolerance towards itself (3C)

[0303] Bystander tolerance induction by prophylactic SLIT treatment with A0086 (FIG. 4). The ability of NTGA 86/51 to induce bystander tolerance, i.e. to induce tolerance against a non-related protein was investigated by SLIT treating the mice for two weeks with NTGA 86/51 followed by an IP sensitization with NTGA 86/51 together with the unrelated protein ovalbumin (OVA). Following this splenocytes were stimulated in vitro either with NTGA 86/51to confirm the ability of this protein to induce tolerance towards itself, or with OVA to investigate if NTGA 86/51 can induce bystander tolerance towards an unrelated protein.

[0304] As shown in FIG. 4A, prophylactic SLIT treatment with NTGA 86/51 is capable of inducing direct tolerance (towards NTGA 86/51 itself), as demonstrated by reduced proliferation of splenocytes from NTGA 86/51 treated mice compared to buffer treated mice. Furthermore, FIG. 4B shows that SLIT treatment with OVA is also able to downregulate the NTGA 86/51 specific in vitro response, demonstrating bystander tolerance induction by OVA SLIT. Likewise, SLIT treatment with NTGA 86/51 is also able to induce bystander tolerance, as measured by the decreased OVA specific in vitro proliferation of splenocytes from A NTGA 86/51-SLIT treated mice compared to buffer treated mice.

[0305] The mechanism behind tolerance induction towards major allergens using proteins that are not themselves major allergens is believed to be induction of regulatory T-cells specific for the proteins used for SLIT treatment. At challenge it is therefore important that these proteins are present in the pollen grains in sufficient amounts to re-activate the regulatory T-cells, in order for the tolerance to spill over to the major allergens. When targeting multiple pollen allergies by one immunogen, it is crucial that this immunogen or one highly conserved thereto is present in all the pollen species of interest in sufficient amounts (pan-pollen immunogen). Furthermore, it may be important that the epitopes recognized by the regulatory T-cells induced during SLIT treatment is sufficiently conserved across the immunogens - otherwise the regulatory T-cells will not be re-activated and tolerance will not occur.

[0306] Whether an immunogen of the invention can relieve an immune response triggered by a pollen allergen in mice that are sensitized to the pollen allergen when starting SLIT treatment can be investigated in a therapeutic mice model. For example, BALB/cJ mice or HLA-transgenic mice may be IP sensitized with model allergen adsorbed to aluminium hydroxide (e.g. an extract of a grass pollen species, e.g. cyn d, Poa p, Phl p or a model allergen like OVA). Subsequently, the mice might be treated by sublingual immunotherapy (SLIT) with an immunogen of the invention for a period of about 4 weeks, followed by about 2 weeks of intranasal challenge with model allergen together with the immunogen or model allergen alone to induce an allergic immune response in the airways. Mice are then sacrificed one day after the last challenge and blood, bronchoalveolar fluid (BAL), spleen and cervical lymph nodes may be collected for analysis. Clinically relevant readouts, such as sneezes, airway hyper-reactivity and presence of eosinophils, might be obtained on the last day of intranasal challenge. For example, sneezed may be observed in an 8 min-period after intranasal administration of model allergen and the numbers of sneezes be counted during this period. Airway hyper-reactivity may be determined using a whole body pletysmograph, airflow obstruction might be induced by increasing concentrations of aerosolized metacholine. Pulmonary airflow obstruction may be measured by enhanced pause (penh) in a period of 6 minutes after administration of metacholine. Differential counting of bronchial fluid (BAL) is performed after centrifugation of BAL fluid and removal of supernatant. The pellet was re-suspended in PBS and the fraction of eosinophils might be determined by an automated cell counter (Sysmex).

[0307] The results may show that an immunogen of the invention is able to reduce the number of sneezes, number of eosinophils, airway obstruction, T cell proliferation of spleen cells or cervical lymph nodes and may be shown to depend on the co-exposure of model allergen and immunogen at the target organ (airways).

[0308] Whether SLIT treatment with pan pollen immunogens is capable of inducing tolerance that can be re-activated by a non-identical, but highly conserved immunogen from a different pollen source can be addressed in several different in vivo models, as outlined below.

[0309] Experiment 1:
[0310] 1. SLIT treatment with immunogen A
[0311] 2. IP Sensitization with immunogen B (contains conserved regions overlapping with A)
[0312] 3. in vitro stimulation with immunogen B

[0313] Where results verify that the specific in vitro proliferation to immunogen B is down-regulated in mice SLIT-treated with immunogen A, then cross-species tolerance induction has been demonstrated for this immunogen, since the two immunogens are sufficiently similar in order for cross-species tolerance induction to occur.

[0314] Experiment 2:
[0315] 1. SLIT treatment with immunogen A
[0316] 2. IP Sensitization with extract of pollen source containing immunogen B (pollen extract containing the homologous immunogen B)
[0317] 3. In vitro stimulation with extract of pollen source containing immunogen B and immunogen B

[0318] Where results verify that the specific in vitro proliferation to immunogen B extract is down-regulated in mice SLIT-treated with immunogen A, then cross-species tolerance induction has been demonstrated for this immunogen. Furthermore, it has been demonstrated that pollen source B contains sufficient amounts of immunogen B to re-activate the tolerance induced by SLIT treatment with immunogen A.

[0319] In the above-mentioned mice model, Balb/cJ mice have been suggested. However, in vivo studies may instead be carried out in humanized mice models using transgenic mice, e.g. “HLA-DRB1*0401 transgenic mice” that may be obtained from Taconic. Also, in the above-mentioned mice models, the immune response against an allergen of a grass pollen (phl p grass extract) have been investigated, but other models may investigate the immune reponse against non-grass pollen allegens, e.g. allergens of weed or tree pollen, or there may be used model allergens like OVA protein.

[0320] Furthermore, the T cell responses in mice or humans may be evaluated by in-vitro T cell proliferation assays or ELISPOT assays. The production of IL-5 and IFN-y from cultured PBMCs (Peripheral blood monocytes) obtained from mice or human in response to stimulation with an immunogen disclosed herein. Such assays are well known in the art. The assays may be able to analyze various different cytokines or cellular mediators associated with the immune response, e.g the cytokines IL-2, IL-4, IL-5, IL-9, IL-10, IL-12, IL-13, IL-17, IL-22, IL-31 and IFN-gamma.

1. A method for relieving an allergic immune response against a pollen allergen of a plant genus selected from any one of Ambrosia, Betula, Fraxinus, Olea, Plantago and Quereus in a subject in need thereof, comprising administering an effective amount of an immunogenic molecule, wherein said molecule comprises or consists of
a polypeptide comprising an amino acid sequence having at least 85% sequence identity to a sequence selected from any one of SEQ ID NOs: 413 and 808-812.

2-41. (canceled)

42. The method according to claim 1, wherein one or more cysteine residues of the sequence of any one of SEQ ID NOs: 413 and 808-812 are substituted with serine, 2-aminobutyric acid or arginine.

43. The method according to claim 1, wherein the allergic immune response is atopic dermatitis, allergic conjunctivitis, allergic rhinitis, or allergic asthma.

44. The method according to claim 1, wherein the subject has exhibited a symptom of, or suffers from, an allergic reaction, allergic response, allergic disorder or allergic disease.

45. The method according to claim 1, wherein the method relieves one or more symptoms of an allergic response or delays the onset of symptoms, slows the progression of symptoms, or induce disease modification.

46. The method according to claim 45, wherein the symptom(s) of an allergic reaction is selected from any of nasal symptoms in the form of itchy nose, sneezing, runny nose, blocked nose; conjunctival symptoms in the form of itchy eyes, red eyes, watery eyes; and
respiratory symptoms in the form of decreased lung function.

47. The method according to claim 1, wherein relieving an allergic response is observed by the patient's need for less concomitant treatment with corticosteroids or HI antihistamines to suppress the symptoms.

48. The method according to claim 1, wherein the treatment comprises immunotherapy.

49-50. (canceled)

51. A molecule comprising or consisting of
a polypeptide comprising an amino acid sequence having at least 85% sequence identity to a sequence selected from any one of SEQ ID NOs: 413 and 808-811.

52-54. (canceled)

55. A composition comprising a molecule according to claim 51 and a pharmaceutically acceptable ingredient or carrier.

56. The composition according to claim 55 that is lyophilized.

57. The composition according to claim 55 that is sterile.

58. The composition according to claim 55, comprising a single dose of the molecule in the range of 5 to 500 microgram.

59. The composition according to claim 55, which is a unit dosage form.

60. The composition according to claim 55, which is a solid dosage form.

61. The molecule according to claim 51, which comprises or consists of a polypeptide comprising an amino acid sequence having at least 95% sequence identity to SEQ ID NO: 413.

62. The molecule according to claim 51, which comprises or consists of a polypeptide comprising an amino acid sequence having at least 95% sequence identity to SEQ ID NO: 811.

63. The molecule according to claim 51, which comprises or consists of a polypeptide comprising an amino acid sequence having at least 90% sequence identity to SEQ ID NO: 808, 809, 810, or 812.

64. The molecule according to claim 51 wherein one or more cysteine residues of the sequences of any one of SEQ IDF NOs: 413, 808-812 are substituted with serine, 2-aminobutyric or arginine.

65. A method for relieving an allergic immune response against a pollen allergen of a plant genus selected from any one of Ambrosia, Betula, Fraxinus, Olea, Plantago and Quercus in a subject in need thereof, comprising administering an effective amount of an immunogenic molecule, wherein said molecule comprises or consists of a polypeptide of 15 to 30 amino acid residues in length and which includes at least one amino acid sequence with 0, 1 or 2 mismatches to a sequence selected from any one of SEQ ID NOs:143-153.

The application's sequence listing, which the Patent Office published only in electronic form, follows.

SEQUENCE LISTING (1177 sequences)

SEQ ID NO: 1 - protein, 15 aa, Phleum Pratense
SDGTFARAAVPSGAS

SEQ ID NO: 2 - protein, 15 aa, Phleum Pratense
KLGANAILAVSLAVC

SEQ ID NO: 3 - protein, 15 aa, Phleum Pratense
KKIPLYQHIANLAGN

SEQ ID NO: 4 - protein, 15 aa, Phleum Pratense
GNKQLVLPVPAFNVI

SEQ ID NO: 5 - protein, 15 aa, Phleum Pratense
KLAMQEFMILPTGAS

SEQ ID NO: 6 - protein, 15 aa, Phleum Pratense
KMGVEVYHNLKSVIK

SEQ ID NO: 7 - protein, 15 aa, Phleum Pratense
GKVVIGMDVAASEFY

SEQ ID NO: 8 - protein, 15 aa, Phleum Pratense
VYKSFVSEYPIVSIE

SEQ ID NO: 9 - protein, 15 aa, Phleum Pratense
IVGDDLLVTNPTRVA

SEQ ID NO: 10 - protein, 15 aa, Phleum Pratense
NALLLKVNQIGSVTE

SEQ ID NO: 11 - protein, 15 aa, Phleum Pratense
ETEDTFIADLAVGLS

SEQ ID NO: 12 - protein, 15 aa, Phleum Pratense
RAAVPSGASTGVYEA

SEQ ID NO: 13 - protein, 15 aa, Phleum Pratense
ERLAKYNQLLRIEEE

SEQ ID NO: 14 - protein, 15 aa, Phleum Pratense
LGAAAVYAGLKFRAP

SEQ ID NO: 15 - protein, 15 aa, Phleum Pratense
GASTGVYEALELRDG

SEQ ID NO: 16 - protein, 15 aa, Phleum Pratense
QTELDNFMVHQLDGT

SEQ ID NO: 17 - protein, 15 aa, Phleum Pratense
VDNVNSIIGPALIGK

SEQ ID NO: 18 - protein, 15 aa, Phleum Pratense
ENRSVLHVALRAPRD

SEQ ID NO: 19 - protein, 15 aa, Phleum Pratense
FLGPLFVHTALQTDP

SEQ ID NO: 20 - protein, 15 aa, Phleum Pratense
RQLRFLANVDPVDVA

SEQ ID NO: 21 - protein, 15 aa, Phleum Pratense
VVSKTFTTAETMLNA

SEQ ID NO: 22 - protein, 15 aa, Phleum Pratense
VSKHMIAVSTNLKLV

SEQ ID NO: 23 - protein, 15 aa, Phleum Pratense
RYSVCSAVGVLPLSL

SEQ ID NO: 24 - protein, 15 aa, Phleum Pratense
AVGVLPLSLQYGFPI

SEQ ID NO: 25 - protein, 15 aa, Phleum Pratense
VLLGLLSVWNVSFLG

SEQ ID NO: 26 - protein, 15 aa, Phleum Pratense
SVWNVSFLGYPARAI

SEQ ID NO: 27 - protein, 15 aa, Phleum Pratense
ARAILPYSQALEKLA

SEQ ID NO: 28 - protein, 15 aa, Phleum Pratense
NGQHSFYQLIHQGRV

SEQ ID NO: 29 - protein, 15 aa, Phleum Pratense
AYEIGQLLAIYEHRI

SEQ ID NO: 30 - protein, 15 aa, Phleum Pratense
LLAIYEHRIAVQGFI

SEQ ID NO: 31 - protein, 15 aa, Phleum Pratense
QGFIWGINSFDQWGV

SEQ ID NO: 32 - protein, 15 aa, Phleum Pratense
ELMSNFFAQPDALAY

SEQ ID NO: 33 - protein, 15 aa, Phleum Pratense
DDGKVYLEMSYYFEI

SEQ ID NO: 34 - protein, 15 aa, Phleum Pratense
PNLTYAKELVERMGL

SEQ ID NO: 35 - protein, 15 aa, Phleum Pratense
RNMVLGKRFFVTPSD

SEQ ID NO: 36 - protein, 15 aa, Phleum Pratense
KRFFVTPSDSVAIIA

SEQ ID NO: 37 - protein, 15 aa, Phleum Pratense
SDSVAIIAANAVQSI

SEQ ID NO: 38 - protein, 15 aa, Phleum Pratense
AVQSIPYFASGLKGV

SEQ ID NO: 39 - protein, 15 aa, Phleum Pratense
KNLNLKFFEVPTGWK

SEQ ID NO: 40 - protein, 15 aa, Phleum Pratense
GIWAVLAWLSIIAYK

SEQ ID NO: 41 - protein, 15 aa, Phleum Pratense
LVSVEDIVLQHWATY

SEQ ID NO: 42 - protein, 15 aa, Phleum Pratense
HQGIRYLFGDGSRLV

SEQ ID NO: 43 - protein, 15 aa, Phleum Pratense
SRLVFRLSGTGSVGA

SEQ ID NO: 44 - protein, 15 aa, Phleum Pratense
GATIRIYIEQYEKDS

SEQ ID NO: 45 - protein, 15 aa, Phleum Pratense
DALSPLVDVALKLSK

SEQ ID NO: 46 - protein, 15 aa, Phleum Pratense
LDIAVRLLEPIKEQV

SEQ ID NO: 47 - protein, 15 aa, Phleum Pratense
IKEQVPILSYADFYQ

SEQ ID NO: 48 - protein, 15 aa, Phleum Pratense
ILSYADFYQLAGVVA

SEQ ID NO: 49 - protein, 15 aa, Phleum Pratense
FYQLAGVVAVEITGG

SEQ ID NO: 50 - protein, 15 aa, Phleum Pratense
NPLIFDNSYFTELLT

SEQ ID NO: 51 - protein, 15 aa, Phleum Pratense
EDAFFADYAEAHLKL

SEQ ID NO: 52 - protein, 15 aa, Phleum Pratense
DNEKSGFISLVSRYL

SEQ ID NO: 53 - protein, 15 aa, Phleum Pratense
IEVRNGFTFLDLIVL

SEQ ID NO: 54 - protein, 15 aa, Phleum Pratense
FLDLIVLQIESLNKK

SEQ ID NO: 55 - protein, 15 aa, Phleum Pratense
LNKKYGSNVPLLLMN

SEQ ID NO: 56 - protein, 15 aa, Phleum Pratense
NVPLLLMNSFNTHED

SEQ ID NO: 57 - protein, 15 aa, Phleum Pratense
LKIVEKYANSSIDIH

SEQ ID NO: 58 - protein, 15 aa, Phleum Pratense
GKLDLLLSQGKEYVF

SEQ ID NO: 59 - protein, 15 aa, Phleum Pratense
GKEYVFIANSDNLGA

SEQ ID NO: 60 - protein, 15 aa, Phleum Pratense
SDNLGAIVDMKILNH

SEQ ID NO: 61 - protein, 15 aa, Phleum Pratense
ISYEGRVQLLEIAQV

SEQ ID NO: 62 - protein, 15 aa, Phleum Pratense
VQLLEIAQVPDAHVD

SEQ ID NO: 63 - protein, 15 aa, Phleum Pratense
FKSIEKFKIFNTNNL

SEQ ID NO: 64 - protein, 15 aa, Phleum Pratense
FKIFNTNNLWVNLKA

SEQ ID NO: 65 - protein, 15 aa, Phleum Pratense
NNLWVNLKAIKRLVE

SEQ ID NO: 66 - protein, 15 aa, Phleum Pratense
IKRLVEADALKMEII

SEQ ID NO: 67 - protein, 15 aa, Phleum Pratense
VKVLQLETAAGAAIR

SEQ ID NO: 68 - protein, 15 aa, Phleum Pratense
AAIRFFDHAIGINVP

SEQ ID NO: 69 - protein, 15 aa, Phleum Pratense
GINVPRSRFLPVKAT

SEQ ID NO: 70 - protein, 15 aa, Phleum Pratense
RFLPVKATSDLQLVQ

SEQ ID NO: 71 - protein, 15 aa, Phleum Pratense
TSDLQLVQSDLYTLV

SEQ ID NO: 72 - protein, 15 aa, Phleum Pratense
VQSDLYTLVDGFVTR

SEQ ID NO: 73 - protein, 15 aa, Phleum Pratense
GPEFKKVGSFLGRFK

SEQ ID NO: 74 - protein, 15 aa, Phleum Pratense
GRFKSIPSIVELDSL

SEQ ID NO: 75 - protein, 15 aa, Phleum Pratense
GTIRNIINGTVFREP

SEQ ID NO: 76 - protein, 15 aa, Phleum Pratense
VFNFTGAGGVALAMY

SEQ ID NO: 77 - protein, 15 aa, Phleum Pratense
EKKWPLYLSTKNTIL

SEQ ID NO: 78 - protein, 15 aa, Phleum Pratense
GRFKDIFQAVYEADW

SEQ ID NO: 79 - protein, 15 aa, Phleum Pratense
WYEHRLIDDMVAYAL

SEQ ID NO: 80 - protein, 15 aa, Phleum Pratense
VQSDFLAQGFGSLGL

SEQ ID NO: 81 - protein, 15 aa, Phleum Pratense
NSIASIFAWTRGLAH

SEQ ID NO: 82 - protein, 15 aa, Phleum Pratense
DNARLLDFTQKLEDA

SEQ ID NO: 83 - protein, 15 aa, Phleum Pratense
LNTEEFIDAVAAELQ

SEQ ID NO: 84 - protein, 15 aa, Phleum Pratense
KSLVRAFMWDSGSTV

SEQ ID NO: 85 - protein, 15 aa, Phleum Pratense
RVLSCDFKPTRPFRI

SEQ ID NO: 86 - protein, 15 aa, Phleum Pratense
HTGSIYAVSWSADSK

SEQ ID NO: 87 - protein, 15 aa, Phleum Pratense
IHYSPDVSMFASADA

SEQ ID NO: 88 - protein, 15 aa, Phleum Pratense
IKLKNMLFHTARINC

SEQ ID NO: 89 - protein, 15 aa, Phleum Pratense
GRYFSKDAVQIITKM

SEQ ID NO: 90 - protein, 15 aa, Phleum Pratense
DAVQIITKMAAANGV

SEQ ID NO: 91 - protein, 15 aa, Phleum Pratense
GVRRVWVGQDSLLST

SEQ ID NO: 92 - protein, 15 aa, Phleum Pratense
SVGFVETLENDLAQL

SEQ ID NO: 93 - protein, 15 aa, Phleum Pratense
LGEAPYKFKSALEAV

SEQ ID NO: 94 - protein, 15 aa, Phleum Pratense
KFKSALEAVKTLRAE

SEQ ID NO: 95 - protein, 15 aa, Phleum Pratense
VVTFNFRADRMVMLA

SEQ ID NO: 96 - protein, 15 aa, Phleum Pratense
ADRMVMLAKALEFAD

SEQ ID NO: 97 - protein, 15 aa, Phleum Pratense
FDKFDRVRVPKIKYA

SEQ ID NO: 98 - protein, 15 aa, Phleum Pratense
PKIKYAGMLQYDGEL

SEQ ID NO: 99 - protein, 15 aa, Phleum Pratense
ECILSGLLSVDGLKV

SEQ ID NO: 100 - protein, 15 aa, Phleum Pratense
LLSVDGLKVLHMDRN

SEQ ID NO: 101 - protein, 15 aa, Phleum Pratense
VPKFMMANGALVRVL

SEQ ID NO: 102 - protein, 15 aa, Phleum Pratense
VRVLIRTSVTKYLNF

SEQ ID NO: 103 - protein, 15 aa, Phleum Pratense
TKYLNFKAVDGSFVY

SEQ ID NO: 104 - protein, 15 aa, Phleum Pratense
TDVEALKSNLMGLFE

SEQ ID NO: 105 - protein, 15 aa, Phleum Pratense
EKRRARKFFIYVQDY

SEQ ID NO: 106 - protein, 15 aa, Phleum Pratense
KFFIYVQDYEEEDPK

SEQ ID NO: 107 - protein, 15 aa, Phleum Pratense
TVDFIGHALALHRDD

SEQ ID NO: 108 - protein, 15 aa, Phleum Pratense
VKRMKLYAESLARFQ

SEQ ID NO: 109 - protein, 15 aa, Phleum Pratense
GELPQAFARLSAVYG

SEQ ID NO: 110 - protein, 15 aa, Phleum Pratense
FARLSAVYGGTYMLN

SEQ ID NO: 111 - protein, 15 aa, Phleum Pratense
KGKFIAFVSTEAETD

SEQ ID NO: 112 - protein, 15 aa, Phleum Pratense
ETTVKDVLALYSKIT

SEQ ID NO: 113 - protein, 15 aa, Phleum Pratense
LDLSVDLNAASAGES

SEQ ID NO: 114 - protein, 15 aa, Phleum Pratense
DEKLLSVFREGVVYG

SEQ ID NO: 115 - protein, 15 aa, Phleum Pratense
GPGVYDIHSPRIPSK

SEQ ID NO: 116 - protein, 15 aa, Phleum Pratense
GAMEKLYDAGKARAI

SEQ ID NO: 117 - protein, 15 aa, Phleum Pratense
KARAIGVSNLASKKL

SEQ ID NO: 118 - protein, 15 aa, Phleum Pratense
KKLGDLLAVARIPPA

SEQ ID NO: 119 - protein, 15 aa, Phleum Pratense
LNGPFIATVQQRGAA

SEQ ID NO: 120 - protein, 15 aa, Phleum Pratense
QQRGAAIIKARKLSS

SEQ ID NO: 121 - protein, 15 aa, Phleum Pratense
IIKARKLSSALSAAS

SEQ ID NO: 122 - protein, 15 aa, Phleum Pratense
LSSALSAASSACDHI

SEQ ID NO: 123 - protein, 15 aa, Phleum Pratense
GTPEGTFVSMGVYSD

SEQ ID NO: 124 - protein, 15 aa, Phleum Pratense
LGLPVFNSVAEAKAE

SEQ ID NO: 125 - protein, 15 aa, Phleum Pratense
TKANASVIYVPPPFA

SEQ ID NO: 126 - protein, 15 aa, Phleum Pratense
VIYVPPPFAAAAIME

SEQ ID NO: 127 - protein, 15 aa, Phleum Pratense
PFAAAAIMEALEAEL

SEQ ID NO: 128 - protein, 15 aa, Phleum Pratense
QHDMVKVKAALNRQS

SEQ ID NO: 129 - protein, 15 aa, Phleum Pratense
TLTYEAVFQTTAVGL

SEQ ID NO: 130 - protein, 15 aa, Phleum Pratense
DKPVVAFIAGLTAPP

SEQ ID NO: 131 - protein, 15 aa, Phleum Pratense
KIKALREAGVTVVES

SEQ ID NO: 132 - protein, 15 aa, Phleum Pratense
GSGDFKTIKEALAKV

SEQ ID NO: 133 - protein, 15 aa, Phleum Pratense
MYVMYIKEGTYKEYV

SEQ ID NO: 134 - protein, 15 aa, Phleum Pratense
VTNLVMIGDGAAKTI

SEQ ID NO: 135 - protein, 15 aa, Phleum Pratense
YQDTLYTHAQRQFFR

SEQ ID NO: 136 - protein, 15 aa, Phleum Pratense
GTIDFIFGNSQVVIQ

SEQ ID NO: 137 - protein, 15 aa, Phleum Pratense
DGYYIHGQCAIIMFD

SEQ ID NO: 138 - protein, 15 aa, Phleum Pratense
QCAIIMFDVTSRLTY

SEQ ID NO: 139 - protein, 15 aa, Phleum Pratense
RKKNLQYYEISAKSN

SEQ ID NO: 140 - protein, 15 aa, Phleum Pratense
SAKSNYNFEKPFLYL

SEQ ID NO: 141 - protein, 15 aa, Phleum Pratense
KPFLYLARKLAGDAN

SEQ ID NO: 142 - protein, 15 aa, Phleum Pratense
EAELAAAAAQPLPDD

SEQ ID NO: 143 - protein, 15 aa, Phleum Pratense
KGKKVFLRADLNVPL

SEQ ID NO: 144 - protein, 15 aa, Phleum Pratense
EKGAKVILASHLGRP

SEQ ID NO: 145 - protein, 15 aa, Phleum Pratense
VPRLSELLGVEVVMA

SEQ ID NO: 146 - protein, 15 aa, Phleum Pratense
GGVLLLENVRFYKEE

SEQ ID NO: 147 - protein, 15 aa, Phleum Pratense
PEFAKKLASVADLYV

SEQ ID NO: 148 - protein, 15 aa, Phleum Pratense
KFLRPSVAGFLMQKE

SEQ ID NO: 149 - protein, 15 aa, Phleum Pratense
VAGFLMQKELDYLVG

SEQ ID NO: 150 - protein, 15 aa, Phleum Pratense
KELDYLVGAVANPKK

SEQ ID NO: 151 - protein, 15 aa, Phleum Pratense
KIGVIESLLAKVDIL

SEQ ID NO: 152 - protein, 15 aa, Phleum Pratense
GMIFTFYKAQGKAVG

SEQ ID NO: 153 - protein, 15 aa, Phleum Pratense
GVSLLLPTDVVVADK

SEQ ID NO: 154 - protein, 15 aa, Phleum Pratense
VELVAVNDPFITTDY

SEQ ID NO: 155 - protein, 15 aa, Phleum Pratense
DYMTYMFKYDTVHGQ

SEQ ID NO: 156 - protein, 15 aa, Phleum Pratense
GGAKKVIISAPSKDA

SEQ ID NO: 157 - protein, 15 aa, Phleum Pratense
YTSDITIVSNASCTT

SEQ ID NO: 158 - protein, 15 aa, Phleum Pratense
KVINDRFGIVEGLMT

SEQ ID NO: 159 - protein, 15 aa, Phleum Pratense
FGIVEGLMTTVHAMT

SEQ ID NO: 160 - protein, 15 aa, Phleum Pratense
GGRAASFNIIPSSTG

SEQ ID NO: 161 - protein, 15 aa, Phleum Pratense
ALNDNFVKLVSWYDN

SEQ ID NO: 162 - protein, 15 aa, Phleum Pratense
LQHISGVILFEETLY

SEQ ID NO: 163 - protein, 15 aa, Phleum Pratense
YEAGARFAKWRAVLK

SEQ ID NO: 164 - protein, 15 aa, Phleum Pratense
GLARYAIICQENGLV

SEQ ID NO: 165 - protein, 15 aa, Phleum Pratense
RCAYVTEVVLAACYK

SEQ ID NO: 166 - protein, 15 aa, Phleum Pratense
WFLSFSFGRALQQST

SEQ ID NO: 167 - protein, 15 aa, Phleum Pratense
VVDTNLESPNDIVPE

SEQ ID NO: 168 - protein, 15 aa, Phleum Pratense
EKHFKYVILGGGVAA

SEQ ID NO: 169 - protein, 15 aa, Phleum Pratense
TEKGIELILSTEIVK

SEQ ID NO: 170 - protein, 15 aa, Phleum Pratense
GGGYIGLELSAALKL

SEQ ID NO: 171 - protein, 15 aa, Phleum Pratense
LKLNNFDVTMVYPEP

SEQ ID NO: 172 - protein, 15 aa, Phleum Pratense
MPRLFTAGIAHFYEG

SEQ ID NO: 173 - protein, 15 aa, Phleum Pratense
HFYEGYYASKGINIV

SEQ ID NO: 174 - protein, 15 aa, Phleum Pratense
VYAIGDVASFPMKLY

SEQ ID NO: 175 - protein, 15 aa, Phleum Pratense
DYLPYFYSRSFDIAW

SEQ ID NO: 176 - protein, 15 aa, Phleum Pratense
RDAHYLRGLLPPAIV

SEQ ID NO: 177 - protein, 15 aa, Phleum Pratense
MHNLRQYTVPLQRYI

SEQ ID NO: 178 - protein, 15 aa, Phleum Pratense
VPLQRYIAMMDLQER

SEQ ID NO: 179 - protein, 15 aa, Phleum Pratense
ERLFYKLLIDNVEEL

SEQ ID NO: 180 - protein, 15 aa, Phleum Pratense
EELLPVVYTPVVGEA

SEQ ID NO: 181 - protein, 15 aa, Phleum Pratense
RSIQVIVVTDGERIL

SEQ ID NO: 182 - protein, 15 aa, Phleum Pratense
GEKVLVQFEDFANHN

SEQ ID NO: 183 - protein, 15 aa, Phleum Pratense
FDLLAKYSKSHLVFN

SEQ ID NO: 184 - protein, 15 aa, Phleum Pratense
VFNDDIQGTASVVLA

SEQ ID NO: 185 - protein, 15 aa, Phleum Pratense
SVVLAGLLAALKVIG

SEQ ID NO: 186 - protein, 15 aa, Phleum Pratense
TGIAELIALEMSKHT

SEQ ID NO: 187 - protein, 15 aa, Phleum Pratense
CRKKIWLVDSKGLLV

SEQ ID NO: 188 - protein, 15 aa, Phleum Pratense
EEAYTWTKGTAVFAS

SEQ ID NO: 189 - protein, 15 aa, Phleum Pratense
GFGLGVVISGAIRVH

SEQ ID NO: 190 - protein, 15 aa, Phleum Pratense
VISGAIRVHDDMLLA

SEQ ID NO: 191 - protein, 15 aa, Phleum Pratense
HDDMLLAASEALAEQ

SEQ ID NO: 192 - protein, 15 aa, Phleum Pratense
FPPFTNIRKISANIA

SEQ ID NO: 193 - protein, 15 aa, Phleum Pratense
IRKISANIAAKVAAK

SEQ ID NO: 194 - protein, 15 aa, Phleum Pratense
VEHKGQVDLVTETDK

SEQ ID NO: 195 - protein, 15 aa, Phleum Pratense
TDKACEDLIFNHLRK

SEQ ID NO: 196 - protein, 15 aa, Phleum Pratense
IEIDSLFEGIDFYST

SEQ ID NO: 197 - protein, 15 aa, Phleum Pratense
IDFYSTITRARFEEL

SEQ ID NO: 198 - protein, 15 aa, Phleum Pratense
IPKVQQLLQDFFNGK

SEQ ID NO: 199 - protein, 15 aa, Phleum Pratense
EAVAYGAAVQAAILS

SEQ ID NO: 200 - protein, 15 aa, Phleum Pratense
VQDLLLLDVTPLSLG

SEQ ID NO: 201 - protein, 15 aa, Phleum Pratense
LAWNCERCRKGESKK

SEQ ID NO: 202 - protein, 15 aa, Phleum Pratense
VRVKILFTALCHTDV

SEQ ID NO: 203 - protein, 15 aa, Phleum Pratense
MCDLLRINTDRGVMI

SEQ ID NO: 204 - protein, 15 aa, Phleum Pratense
KPIFHFVGTSTFSEY

SEQ ID NO: 205 - protein, 15 aa, Phleum Pratense
VGTSTFSEYTVMHVG

SEQ ID NO: 206 - protein, 15 aa, Phleum Pratense
VAIFGLGAVGLAAAE

SEQ ID NO: 207 - protein, 15 aa, Phleum Pratense
GAVGLAAAEGARIAG

SEQ ID NO: 208 - protein, 15 aa, Phleum Pratense
GNINAMIQAFECVHD

SEQ ID NO: 209 - protein, 15 aa, Phleum Pratense
LKGTFFGNFKPRTDL

SEQ ID NO: 210 - protein, 15 aa, Phleum Pratense
KFITHSVTFSEINKA

SEQ ID NO: 211 - protein, 15 aa, Phleum Pratense
VTFSEINKAFDLMAK

SEQ ID NO: 212 - protein, 15 aa, Phleum Pratense
ALRWNLQMGHSVLPK

SEQ ID NO: 213 - protein, 15 aa, Phleum Pratense
DDLLAKFSEIKQTRL

SEQ ID NO: 214 - protein, 15 aa, Phleum Pratense
QDFKKVNEIYAKYFP

SEQ ID NO: 215 - protein, 15 aa, Phleum Pratense
NEIYAKYFPSPAPAR

SEQ ID NO: 216 - protein, 15 aa, Phleum Pratense
YFPSPAPARSTYQVA

SEQ ID NO: 217 - protein, 15 aa, Phleum Pratense
ARSTYQVAALPLDAR

SEQ ID NO: 218 - protein, 15 aa, Phleum Pratense
LPLDARIEIECIAAL

SEQ ID NO: 219 - protein, 15 aa, Phleum Pratense
GWYHLFYQYNPEGAV

SEQ ID NO: 220 - protein, 15 aa, Phleum Pratense
SRDLIHWRHLPLAMV

SEQ ID NO: 221 - protein, 15 aa, Phleum Pratense
LNMLYTGSTNASVQV

SEQ ID NO: 222 - protein, 15 aa, Phleum Pratense
EAFSVRVLVDHSIVE

SEQ ID NO: 223 - protein, 15 aa, Phleum Pratense
GAFTGEVSAEMLANL

SEQ ID NO: 224 - protein, 15 aa, Phleum Pratense
VSAEMLANLGIPWVI

SEQ ID NO: 225 - protein, 15 aa, Phleum Pratense
GESSEFVGDKVAYAL

SEQ ID NO: 226 - protein, 15 aa, Phleum Pratense
GDKVAYALAQGLKVI

SEQ ID NO: 227 - protein, 15 aa, Phleum Pratense
DWTNVVIAYEPVWAI

SEQ ID NO: 228 - protein, 15 aa, Phleum Pratense
IAYEPVWAIGTGKVA

SEQ ID NO: 229 - protein, 15 aa, Phleum Pratense
LKPEFIDIINAATVK

SEQ ID NO: 230 - protein, 15 aa, Phleum Pratense
VWQHDRVEIIANDQG

SEQ ID NO: 231 - protein, 15 aa, Phleum Pratense
VEIIANDQGNRTTPS

SEQ ID NO: 232 - protein, 15 aa, Phleum Pratense
TTPSYVAFTDSERLI

SEQ ID NO: 233 - protein, 15 aa, Phleum Pratense
EEKQFAAEEISSMVL

SEQ ID NO: 234 - protein, 15 aa, Phleum Pratense
SSMVLIKMREIAEAF

SEQ ID NO: 235 - protein, 15 aa, Phleum Pratense
SIKNAVVTVPAYFND

SEQ ID NO: 236 - protein, 15 aa, Phleum Pratense
GVIAGLNVLRIINEP

SEQ ID NO: 237 - protein, 15 aa, Phleum Pratense
VLRIINEPTAAAIAY

SEQ ID NO: 238 - protein, 15 aa, Phleum Pratense
FAWSLLDNFEWRMGF

SEQ ID NO: 239 - protein, 15 aa, Phleum Pratense
IELWQVKSGTLFDNI

SEQ ID NO: 240 - protein, 15 aa, Phleum Pratense
EDVAVSLAKYTAELS

SEQ ID NO: 241 - protein, 15 aa, Phleum Pratense
DSNYKLAVDGLLSKV

SEQ ID NO: 242 - protein, 15 aa, Phleum Pratense
PPPQRITFTFPVIKS

SEQ ID NO: 243 - protein, 15 aa, Phleum Pratense
APWLLTVGASTSDRR

SEQ ID NO: 244 - protein, 15 aa, Phleum Pratense
ELRKTYNLLDAVSRH

SEQ ID NO: 245 - protein, 15 aa, Phleum Pratense
QVYPRSWSAVMLTFD

SEQ ID NO: 246 - protein, 15 aa, Phleum Pratense
AVMLTFDNAGMWNVR

SEQ ID NO: 247 - protein, 15 aa, Phleum Pratense
GEQLYISVISPARSL

SEQ ID NO: 248 - protein, 15 aa, Phleum Pratense
LKSIKAFASGILVPK

SEQ ID NO: 249 - protein, 15 aa, Phleum Pratense
PESKVFYLKMKGDYH

SEQ ID NO: 250 - protein, 15 aa, Phleum Pratense
MNSYKAAQDIALADL

SEQ ID NO: 251 - protein, 15 aa, Phleum Pratense
APTHPIRLGLALKIS

SEQ ID NO: 252 - protein, 15 aa, Phleum Pratense
WSEIQTLKPNLIGPF

SEQ ID NO: 253 - protein, 15 aa, Phleum Pratense
KFMTLAGFLDYAKAS

SEQ ID NO: 254 - protein, 15 aa, Phleum Pratense
NISGILIGIEHAAYL

SEQ ID NO: 255 - protein, 15 aa, Phleum Pratense
AAYLATRGLDVVDAV

SEQ ID NO: 256 - protein, 15 aa, Phleum Pratense
GLVTEFPSTAAAYFR

SEQ ID NO: 257 - protein, 15 aa, Phleum Pratense
NIVVNVFNQLDQPLL

SEQ ID NO: 258 - protein, 15 aa, Phleum Pratense
IGSFFYFPSIGMQRT

SEQ ID NO: 259 - protein, 15 aa, Phleum Pratense
GYGLISVVSRLLIPV

SEQ ID NO: 260 - protein, 15 aa, Phleum Pratense
VVSRLLIPVPFDPPA

SEQ ID NO: 261 - protein, 15 aa, Phleum Pratense
SVFKKFPKFRRVLVI

SEQ ID NO: 262 - protein, 15 aa, Phleum Pratense
KELGGKILRQPGPLP

SEQ ID NO: 263 - protein, 15 aa, Phleum Pratense
ILRQPGPLPGLNTKI

SEQ ID NO: 264 - protein, 15 aa, Phleum Pratense
KIASFLDPDGWKVVL

SEQ ID NO: 265 - protein, 15 aa, Phleum Pratense
GWKVVLVDHADFLKE

SEQ ID NO: 266 - protein, 15 aa, Phleum Pratense
RLVCLRVHPTFTLLH

SEQ ID NO: 267 - protein, 15 aa, Phleum Pratense
YFVEAYLNNPLVQKA

SEQ ID NO: 268 - protein, 15 aa, Phleum Pratense
VQKAIHANTALNYPW

SEQ ID NO: 269 - protein, 15 aa, Phleum Pratense
LYSGDLDAMVPVTAS

SEQ ID NO: 270 - protein, 15 aa, Phleum Pratense
VKKIVTVLNEAEVPS

SEQ ID NO: 271 - protein, 15 aa, Phleum Pratense
EDAVEVVVSPPFVFL

SEQ ID NO: 272 - protein, 15 aa, Phleum Pratense
ALLRPDFAVAAQNCW

SEQ ID NO: 273 - protein, 15 aa, Phleum Pratense
GAFTGEISAEMLVNL

SEQ ID NO: 274 - protein, 15 aa, Phleum Pratense
ISAEMLVNLQVPWVI

SEQ ID NO: 275 - protein, 15 aa, Phleum Pratense
ADKVAYALAQGLKVI

SEQ ID NO: 276 - protein, 15 aa, Phleum Pratense
TTMEVVAAQTKAIAE

SEQ ID NO: 277 - protein, 15 aa, Phleum Pratense
WTNVVLAYEPVWAIG

SEQ ID NO: 278 - protein, 15 aa, Phleum Pratense
EDSHFVVELTYNYGV

SEQ ID NO: 279 - protein, 15 aa, Phleum Pratense
RAIKFYEKAFGMELL

SEQ ID NO: 280 - protein, 15 aa, Phleum Pratense
NPQYKYTIAMMGYGP

SEQ ID NO: 281 - protein, 15 aa, Phleum Pratense
KNAVLELTYNYGVKE

SEQ ID NO: 282 - protein, 15 aa, Phleum Pratense
DGWKSVFVDNLDFLK

SEQ ID NO: 283 - protein, 15 aa, Phleum Pratense
FTVQEMVALSGAHTL

SEQ ID NO: 284 - protein, 15 aa, Phleum Pratense
YSDLYQLAGVVAVEV

SEQ ID NO: 285 - protein, 15 aa, Phleum Pratense
DHLRQVFGKQMGLSD

SEQ ID NO: 286 - protein, 15 aa, Phleum Pratense
FSCDSAYQVTYIVRG

SEQ ID NO: 287 - protein, 15 aa, Phleum Pratense
YQVTYIVRGSGRVQV

SEQ ID NO: 288 - protein, 15 aa, Phleum Pratense
GMEWFSIITTPNPIF

SEQ ID NO: 289 - protein, 15 aa, Phleum Pratense
GKTSVWKAISPEVLE

SEQ ID NO: 290 - protein, 15 aa, Phleum Pratense
ARSALTISVLRISSM

SEQ ID NO: 291 - protein, 15 aa, Phleum Pratense
ISVLRISSMPFSVYH

SEQ ID NO: 292 - protein, 15 aa, Phleum Pratense
KHLIYVTGWSVYTEI

SEQ ID NO: 293 - protein, 15 aa, Phleum Pratense
TGWSVYTEITLLRDA

SEQ ID NO: 294 - protein, 15 aa, Phleum Pratense
SEGVRVLMLVWDDRT

SEQ ID NO: 295 - protein, 15 aa, Phleum Pratense
DDSGSIVQDLQISTM

SEQ ID NO: 296 - protein, 15 aa, Phleum Pratense
LQISTMFTHHQKIVV

SEQ ID NO: 297 - protein, 15 aa, Phleum Pratense
PVAWDVLYNFEQRWR

SEQ ID NO: 298 - protein, 15 aa, Phleum Pratense
AWNVQLFRSIDGGAA

SEQ ID NO: 299 - protein, 15 aa, Phleum Pratense
DAYICAIRRAKSFIY

SEQ ID NO: 300 - protein, 15 aa, Phleum Pratense
IRRAKSFIYIENQYF

SEQ ID NO: 301 - protein, 15 aa, Phleum Pratense
FIYIENQYFLGSSYC

SEQ ID NO: 302 - protein, 15 aa, Phleum Pratense
RFTVYVVVPMWPEGI

SEQ ID NO: 303 - protein, 15 aa, Phleum Pratense
DYLKAQQNRRFMIYV

SEQ ID NO: 304 - protein, 15 aa, Phleum Pratense
FMIYVHTKMMIVDDE

SEQ ID NO: 305 - protein, 15 aa, Phleum Pratense
IVDDEYIIVGSANIN

SEQ ID NO: 306 - protein, 15 aa, Phleum Pratense
GQVHGFRMALWYEHL

SEQ ID NO: 307 - protein, 15 aa, Phleum Pratense
LPGVEFFPDTQARIL

SEQ ID NO: 308 - protein, 15 aa, Phleum Pratense
EPPQFIALFQPMVIL

SEQ ID NO: 309 - protein, 15 aa, Phleum Pratense
QQQWAAKVAEFLKPG

SEQ ID NO: 310 - protein, 15 aa, Phleum Pratense
RASALAALSSAFNPS

SEQ ID NO: 311 - protein, 15 aa, Phleum Pratense
SQRAAAVAALSNVLT

SEQ ID NO: 312 - protein, 15 aa, Phleum Pratense
NIWADDLAASLSTLE

SEQ ID NO: 313 - protein, 15 aa, Phleum Pratense
MVEYFGEQLSGFAFT

SEQ ID NO: 314 - protein, 15 aa, Phleum Pratense
LSGFAFTANGWVQSY

SEQ ID NO: 315 - protein, 15 aa, Phleum Pratense
NPMTVFWSKMAQSMT

SEQ ID NO: 316 - protein, 15 aa, Phleum Pratense
KDKLVVSTSCSLMHT

SEQ ID NO: 317 - protein, 15 aa, Phleum Pratense
TSCSLMHTAVDLVNE

SEQ ID NO: 318 - protein, 15 aa, Phleum Pratense
TKLDSEIKSWLAFAA

SEQ ID NO: 319 - protein, 15 aa, Phleum Pratense
IKSWLAFAAQKVVEV

SEQ ID NO: 320 - protein, 15 aa, Phleum Pratense
EGPLMLYVSKMIPAS

SEQ ID NO: 321 - protein, 15 aa, Phleum Pratense
KGRFFAFGRVFAGRV

SEQ ID NO: 322 - protein, 15 aa, Phleum Pratense
GNTVALVGLDQFITK

SEQ ID NO: 323 - protein, 15 aa, Phleum Pratense
VGLDQFITKNATLTG

SEQ ID NO: 324 - protein, 15 aa, Phleum Pratense
PIRAMKFSVSPVVRV

SEQ ID NO: 325 - protein, 15 aa, Phleum Pratense
FMGGAEIIVSPPVVS

SEQ ID NO: 326 - protein, 15 aa, Phleum Pratense
SPPVVSFRETVLDKS

SEQ ID NO: 327 - protein, 15 aa, Phleum Pratense
NKHNRLYMEARPLEE

SEQ ID NO: 328 - protein, 15 aa, Phleum Pratense
PTARRVIFASQLTAK

SEQ ID NO: 329 - protein, 15 aa, Phleum Pratense
AKPRLLEPVYLVEIQ

SEQ ID NO: 330 - protein, 15 aa, Phleum Pratense
EPVYLVEIQAPEGAL

SEQ ID NO: 331 - protein, 15 aa, Phleum Pratense
PLYNIKAYLPVIESF

SEQ ID NO: 332 - protein, 15 aa, Phleum Pratense
LPVIESFGFSATLRA

SEQ ID NO: 333 - protein, 15 aa, Phleum Pratense
FGFSATLRAATSGQA

SEQ ID NO: 334 - protein, 15 aa, Phleum Pratense
EVYEARLTKFKYLAG

SEQ ID NO: 335 - protein, 15 aa, Phleum Pratense
GMTGMLWETSLLDPE

SEQ ID NO: 336 - protein, 15 aa, Phleum Pratense
PEGLLWLLLTGKVPT

SEQ ID NO: 337 - protein, 15 aa, Phleum Pratense
QFTTGVMALQVESEF

SEQ ID NO: 338 - protein, 15 aa, Phleum Pratense
DPKMLELMRLYITIH

SEQ ID NO: 339 - protein, 15 aa, Phleum Pratense
ALSDPYLSFAAALNG

SEQ ID NO: 340 - protein, 15 aa, Phleum Pratense
LSFAAALNGLAGPLH

SEQ ID NO: 341 - protein, 15 aa, Phleum Pratense
PLHGLANQEVLLWIK

SEQ ID NO: 342 - protein, 15 aa, Phleum Pratense
QEVLLWIKSVMEETG

SEQ ID NO: 343 - protein, 15 aa, Phleum Pratense
QLKEYVWKTLKSGKV

SEQ ID NO: 344 - protein, 15 aa, Phleum Pratense
EDPLFQLVSKLYEVV

SEQ ID NO: 345 - protein, 15 aa, Phleum Pratense
LVSKLYEVVPGILTE

SEQ ID NO: 346 - protein, 15 aa, Phleum Pratense
SGVLLNHFGLVEARY

SEQ ID NO: 347 - protein, 15 aa, Phleum Pratense
TVLFGVSRSMGIGSQ

SEQ ID NO: 348 - protein, 15 aa, Phleum Pratense
GSQLIWDRALGLPLE

SEQ ID NO: 349 - protein, 15 aa, Phleum Pratense
GPVTILNWSFVRNDQ

SEQ ID NO: 350 - protein, 15 aa, Phleum Pratense
PRFETCYQIALAIKK

SEQ ID NO: 351 - protein, 15 aa, Phleum Pratense
GIQVIQIDEAALREG

SEQ ID NO: 352 - protein, 15 aa, Phleum Pratense
EHAFYLDWAVHSFRI

SEQ ID NO: 353 - protein, 15 aa, Phleum Pratense
FNDIIHSIINMDADV

SEQ ID NO: 354 - protein, 15 aa, Phleum Pratense
SDEKLLSVFREGVTY

SEQ ID NO: 355 - protein, 15 aa, Phleum Pratense
VNKMLAVLDTNILWV

SEQ ID NO: 356 - protein, 15 aa, Phleum Pratense
TRKYAEVMPALTNMV

SEQ ID NO: 357 - protein, 15 aa, Phleum Pratense
TREENVYMAKLAEQA

SEQ ID NO: 358 - protein, 15 aa, Phleum Pratense
YEEMVEFMEKVAKTA

SEQ ID NO: 359 - protein, 15 aa, Phleum Pratense
EERNLLSVAYKNVIG

SEQ ID NO: 360 - protein, 15 aa, Phleum Pratense
AYKNVIGARRASWRI

SEQ ID NO: 361 - protein, 15 aa, Phleum Pratense
RRASWRIISSIEQKE

SEQ ID NO: 362 - protein, 15 aa, Phleum Pratense
SKICDGILKLLDSHL

SEQ ID NO: 363 - protein, 15 aa, Phleum Pratense
AESKVFYLKMKGDYH

SEQ ID NO: 364 - protein, 15 aa, Phleum Pratense
GDYHRYLAEFKAGAE

SEQ ID NO: 365 - protein, 15 aa, Phleum Pratense
NTLVAYKSAQDIALA

SEQ ID NO: 366 - protein, 15 aa, Phleum Pratense
LPTTHPIRLGLALNF

SEQ ID NO: 367 - protein, 15 aa, Phleum Pratense
IRLGLALNFSVFYYE

SEQ ID NO: 368 - protein, 15 aa, Phleum Pratense
LNFSVFYYEILNSPD

SEQ ID NO: 369 - protein, 15 aa, Phleum Pratense
YKDSTLIMQLLRDNL

SEQ ID NO: 370 - protein, 15 aa, Phleum Pratense
IMQLLRDNLTLWTSD

SEQ ID NO: 371 - protein, 15 aa, Phleum Pratense
ADGILFGFPTRFGMM

SEQ ID NO: 372 - protein, 15 aa, Phleum Pratense
QTYYLSMEYLQGRAL

SEQ ID NO: 373 - protein, 15 aa, Phleum Pratense
RLAACFLDSMATLNL

SEQ ID NO: 374 - protein, 15 aa, Phleum Pratense
LRYRYGLFKQRIAKE

SEQ ID NO: 375 - protein, 15 aa, Phleum Pratense
FSPWEIVRHDVVYPV

SEQ ID NO: 376 - protein, 15 aa, Phleum Pratense
GEVLNALAYDVPIPG

SEQ ID NO: 377 - protein, 15 aa, Phleum Pratense
IPGYKTKNAISLRLW

SEQ ID NO: 378 - protein, 15 aa, Phleum Pratense
AEDFNLFQFNDGQYE

SEQ ID NO: 379 - protein, 15 aa, Phleum Pratense
EGKLLRLKQQFFLCS

SEQ ID NO: 380 - protein, 15 aa, Phleum Pratense
LKQQFFLCSASLQDI

SEQ ID NO: 381 - protein, 15 aa, Phleum Pratense
PTLAIPELMRLLMDE

SEQ ID NO: 382 - protein, 15 aa, Phleum Pratense
PQKPVVRMANLCVVS

SEQ ID NO: 383 - protein, 15 aa, Phleum Pratense
ILKEELFADYVSIWP

SEQ ID NO: 384 - protein, 15 aa, Phleum Pratense
PRRWLRFCNPELSEI

SEQ ID NO: 385 - protein, 15 aa, Phleum Pratense
IKRIHEYKRQLMNIL

SEQ ID NO: 386 - protein, 15 aa, Phleum Pratense
YKRQLMNILGAVYRY

SEQ ID NO: 387 - protein, 15 aa, Phleum Pratense
LGAVYRYKKLKEMSA

SEQ ID NO: 388 - protein, 15 aa, Phleum Pratense
GKAFATYTNAKRIVK

SEQ ID NO: 389 - protein, 15 aa, Phleum Pratense
KRIVKLVNDVGAVVN

SEQ ID NO: 390 - protein, 15 aa, Phleum Pratense
VNKYLKVVFIPNYNV

SEQ ID NO: 391 - protein, 15 aa, Phleum Pratense
VFIPNYNVSVAEVLI

SEQ ID NO: 392 - protein, 15 aa, Phleum Pratense
FLVGYDFPSYIDAQA

SEQ ID NO: 393 - protein, 15 aa, Phleum Pratense
KRWIKMSILNTAGSG

SEQ ID NO: 394 - protein, 15 aa, Phleum Pratense
PDLPYDYGALEPAIS

SEQ ID NO: 395 - protein, 15 aa, Phleum Pratense
HAYYLQYKNVRPDYL

SEQ ID NO: 396 - protein, 15 aa, Phleum Pratense
PDYLTNIWKVVNWKY

SEQ ID NO: 397 - protein, 15 aa, Phleum Pratense
HYKGSSFHRVIPGFM

SEQ ID NO: 398 - protein, 446 aa, Phleum Pratense
MAATIQSVKARQIFDSRGNPTVEVDVCCSDGTFARAAVPSGASTGVYEALELRDGGSDYLGKGVLKAVDNVNSIIGPALIGKDPTEQTELDNFMVHQLDGTKNEWGWCKQKLGANAILAVSLAVCKAGALVKKIPLYQHIANLAGNKQLVLPVPAFNVINGGSHAGNKLAMQEFMILPTGASSFKEAMKMGVEVYHNLKSVIKKKYGQDATNVGDEGGFAPNIQENKEGLELLKTAIEKAGYTGKVVIGMDVAASEFYGEKDQTYDLNFKEENNDGSQKISGDSLKNVYKSFVSEYPIVSIEDPFDQDDWVHYAKMTEEIGEQVQIVGDDLLVTNPTRVAKAIAEKSCNALLLKVNQIGSVTESIEAVKMSKRAGWGVMTSHRSGETEDTFIADLAVGLSTGQIKTGAPCRSERLAKYNQLLRIEEELGAAAVYAGLKFRAPVEPY

SEQ ID NO: 399 - protein, 566 aa, Phleum Pratense
MASPALISDTDQWKALQAHVGAIHKTHLRDLMADADRCKALTAEFEGVFLDYSRQQATTETVDKLFKLAEAAKLKEKIAKMFNGDKINSTENRSVLHVALRAPRDAVINSDGVNVVPEVWAVIDKIKQFSETFRSGSWVGATGKPLTNVVSVGIGGSFLGPLFVHTALQTDPEAAESAKGRQLRFLANVDPVDVARSIKDLDPETTLVVVVSKTFTTAETMLNARTIKEWIVSSLGPQAVSKHMIAVSTNLKLVKEFGIDPNNAFAFWDWVGGRYSVCSAVGVLPLSLQYGFPIVQRFLEGASSIDNHFRTASFEKNIPVLLGLLSVWNVSFLGYPARAILPYSQALEKLAPHIQQLSMESNGKGVSIDGVPLPYEAGEIDFGEPGTNGQHSFYQLIHQGRVIPCDFIGVIKSQQPVYLKGETSNHDELMSNFFAQPDALASRKTPAPLRSENVSENLIPHKTFKGNRPSLSFLLSSLSAYEIGQLLAIYEHRIAVQGFIWGINSFDQWGVELGKSLASQVRKQLHASRMEGKPVEGFNPSSASLLARYLAVEPSTPYDTTVLPKV

SEQ ID NO: 400 - protein, 212 aa, Phleum Pratense
MDDHKEHKEKEHTGGNPEVNEEEEEDEEAKRAVLLGPQVPLKEQLELDKDDESLRRWKEQLLGQVDTEQLGETAEPEVKVVDLTILSPDRPDLVLPIPFVADEKGYAFALKDGSTYSFRFSFIVSNNIVSGLKYTNTVWKTGVRVENQKMMLGTFSPQPEPYIYVGEEETTPAGIFARGSYSAKLKFVDDDGKVYLEMSYYFEIRKDWPTGQ

SEQ ID NO: 401 - protein, 383 aa, Phleum Pratense
YIKLMKTIFDFESIKKLLASPKFSFCFDGLHGVAGAYAKRMFVDELGASESSLLNCVPKEDFGGGHPDPNLTYAKELVERMGLGKSSSNVEPPEFGAAADGDADRNMVLGKRFFVTPSDSVAIIAANAVQSIPYFASGLKGVARSMPTSAALDVVAKNLNLKFFEVPTGWKFFGNLMDAGMCSVCGEESFGTGSDHIREKDGIWAVLAWLSIIAYKNKDNLGGDKLVSVEDIVLQHWATYGRHYYTRYDYENVDAEAAKELMANLVKMQSALSDVNKLIKEIQPDVAEVVSADEFEYKDPVDGSVSKHQGIRYLFGDGSRLVFRLSGTGSVGATIRIYIEQYEKDSSKTGRESSDALSPLVDVALKLSKIKEYTGRSAPTVIT

SEQ ID NO: 402 - protein, 250 aa, Phleum Pratense
MAAKCYPTVSDEYLAAVAKARRKLRGLIAEKNCAPLMLRIAWHSAGTFDVATKTGGPFGTMRCPAELAHGANAGLDIAVRLLEPIKEQVPILSYADFYQLAGVVAVEITGGPEVPFHPGRQDKTEPPPEGRLPDATLGSDHLRQVFTAQMGLSDQDIVALSGGHTLGRCHKERSGFEGAWTANPLIFDNSYFTELLTGEKEGLLQLPTDKTLLTDPAFRPLVEKYAADEDAFFADYAEAHLKLSELGFGE

SEQ ID NO: 403 - protein, 467 aa, Phleum Pratense
MADEKLAKLREAVAGLPQISDNEKSGFISLVSRYLSGEEEHIEWPKIHTPTDEVVVPYDTVDAPPEDLEATKALLDKLAVLKLNGGLGTTMGCTGPKSVIEVRNGFTFLDLIVLQIESLNKKYGSNVPLLLMNSFNTHEDTLKIVEKYANSSIDIHTFNQSQYPRVVADEFLPWPSKGKTDKDGWYPPGHGDIFPSLMNSGKLDLLLSQGKEYVFIANSDNLGAIVDMKILNHLIHKQNEYCMEVTPKTLADVKGGTLISYEGRVQLLEIAQVPDAHVDEFKSIEKFKIFNTNNLWVNLKAIKRLVEADALKMEIIPNPKEVDGVKVLQLETAAGAAIRFFDHAIGINVPRSRFLPVKATSDLQLVQSDLYTLVDGFVTRNSARTDPSNPSIELGPEFKKVGSFLGRFKSIPSIVELDSLKVSGDVWFGSGIVLKGKVTITAKPGVKLEIPDGAVLENKDINGAEDL

SEQ ID NO: 404 - protein, 411 aa, Phleum Pratense
MAFEKIKVANPIVEMGDEMTRVFWQSIKEKLIFPFLDLDIKYYDLGVLHRDATDDKVTVEAAEATLKYNVAIKCATITPDEDRVKEFNLKQMWRSPNGTIRNIINGTVFREPIICKNVPKLVPGWTKPICIGRHAFGDQYRATDAVLKGPGKLRLVFEGKDETVDLEVFNFTGAGGVALAMYNTDESIQGFAEASMAIAYEKKWPLYLSTKNTILKKYDGRFKDIFQAVYEADWKSKYEAAGIWYEHRLIDDMVAYALKSEGGYVWACKNYDGDVQSDFLAQGFGSLGLMTSVLMCPDGKTIEAEAAHGTVTRHFRVHQKGGETSTNSIASIFAWTRGLAHRAKLDDNARLLDFTQKLEDACVGTVESGKMTKDLALLVHGSSKVTRGDYLNTEEFIDAVAAELQSRLAAN

SEQ ID NO: 405 - protein, 525 aa, Phleum Pratense
FEGCLAKSYKSEKSDKSATYDYSANIECEKEPPKPLYGGGILTGAEAPAPVSAGGKKLLMAKSKSAPAKGSTLKVELEKDTHYTLSAWLQLSKSTGDVKAILVTPDGNFNTAGMLVVQSGCWTMLKGGATSFAAGKGELFFETNVTAELMVDSMSLQPFSFEEWKSHRHESIAKERKKKVKITVHGSDGKVLPDAELSLERVAKGFPLGNAMTKEILDIPEYEKWFTSRFTVATMENEMKWYSTEYDQNQELYEIPDKMLALAEKYNISVRGHNVFWDDQSKQMDWVSKLSAPQLKKAMEKRMKNVVSRYAGKLIHWDVLNENLHYSFFEDKLGKDASAEVFKEVAKLDDKPILFMNEYNTIEEPNDAAPLPTKYLAKLKQIQSYPGNSKLKYGIGLESHFDTPNIPYVRGSLDTLAQAKVPIWLTEIDVKKGPKQVEYLEEVMREGFAHPGVKGIVLWGAWHAKECYVMCLTDKNFKNLPVGDVVDKLITEWKAVPEDAKTDDKGVFEAELFHGEYNVTVKHKS

SEQ ID NO: 406 - protein, 608 aa, Phleum Pratense
MAQLQETYACSPATERGRGILLGGDAKTDTIVYCAGRTVFFRRLDAPLDAWTYTEHAYPTTVARISPNGEWVASADVSGCVRVWGRNGDRALKAEFRPISGRVDDLRWSPDGLRIVVSGDGKGKSLVRAFMWDSGSTVGDFDGHSKRVLSCDFKPTRPFRIVTCGEDFLANYYEGPPFKFKHSIRDHSNFVNCIRYSPDGSKFITVSSDKRGLIYDGKTGDKIGELSSEDSHTGSIYAVSWSADSKQVLTVSADKTAKVWDIMEDASGKVNRTLVCTGIGGVDDMLVGCLWQNDHLVTVSLGGTFNVFSASNPDKEPVSFAGHLKTVSSLTYFPQSNPRTMLSTSYDGVIIRWIQGVGYGGRLIRKNNTQIKCFVAAEEELITSGYDNMVFRIPLNGDQCGDAESVDVGGQPNALNIAVQQPEFALITTDSAIVLLHKSTVTSTTKVSYTITSSAVSPDGTEAIVGAQDGKLRIYSISGDTLTEEAVLERHRGAITSIHYSPDVSMFASADANREAVAWDRATREIKLKNMLFHTARINCLAWSPDSRLVATGSIDTCAIIYDVDKPASSRITIKGAHLGGVHGLTFADNDTLVTAGEDACVRVWKLV

SEQ ID NO: 407 - protein, 582 aa, Phleum Pratense
MVFSVTKKDTKPFDGQKPGTSGLRKKVTVFQQPHYLANFVQSTFNALPADQVKGATIVVSGDGRYFSKDAVQIITKMAAANGVRRVWVGQDSLLSTPAVSAIIRERIAADGSKATGAFILTASHNPGGPTEDFGIKYNMGNGGPAPESVTDKIFSNTTTITEYLIAEDLPDVDISALGVTTFTGPEGPFDVDVFDSATDYIKLMKTIFDFESIKKLLASPKFSFCFDGLHGVAGAYAKRMFVDELGASESSLLNCVPKEDFGGGHPDPNLTYAKELVERMGLGKSSSNVEPPEFGAAADGDADRNMVLGKRFFVTPSDSVAIIAANAVQSIPYFASGLKGVARSMPTSAALDVVAKNLNLKFFEVPTGWKFFGNLMDAGMCSVCGEESFGTGSDHIREKDGIWAVLAWLSIIAYKNKDNLGGDKLVSVEDIVLQHWATYGRHYYTRYDYENVDAEAAKELMANLVKMQSALSDVNKLIKEIQPDVAEVVSADEFEYKDPVDGSVSKHQGIRYLFGDGSRLVFRLSGTGSVGATIRIYIEQYEKDSSKTGRESSDALSPLVDVALKLSKIKEYTGRSAPTVIT

SEQ ID NO: 408 - protein, 555 aa, Phleum Pratense
MATSWTLPDHPTLPKGKTVAVIVLDGWGEASADQYNCIHRAETPVMDSLKNGAPEKWTLVKAHGTAVGLPSDDDMGNSEVGHNALGAGRIFAQGAKLVDAALASGKIWEAEGFNYIKESFAEGTLHLIGLLSDGGVHSRLDQVQLLVKGASERGAKRIRLHILTDGRDVLDGSSVGFVETLENDLAQLREKGVDAQVASGGGRMYVTMDRYENDWDVVKRGWDAQVLGEAPYKFKSALEAVKTLRAEPKANDQYLPAFVIVDESGKSVGPIVDGDAVVTFNFRADRMVMLAKALEFADFDKFDRVRVPKIKYAGMLQYDGELKLPNKFLVSPPLIERTSGEYLVKNGVRTFACSETVKFGHVTFFWNGNRSGYFDETKEEYIEIPSDSGITFNEQPKMKALEIAEKTRDAILSGKFDQVRINLPNGDMVGHTGDIEATVVACKAADEAVKIVLDAVEQVGGIYLVTADHGNAEDMVKRNKSGQPALDKSGSIQILTSHTLQPVPVAIGGPGLHPGVKFRSDINTPGLANVAATVMNLHGFQAPDDYETTLIEVAD

SEQ ID NO: 409 - protein, 445 aa, Phleum Pratense
MDEEYDVIVLGTGLKECILSGLLSVDGLKVLHMDRNDYYGGESTSLNLTKIWKRFKGSEATPDHLGVSKEYNVDMVPKFMMANGALVRVLIRTSVTKYLNFKAVDGSFVYNNGKIHKVPATDVEALKSNLMGLFEKRRARKFFIYVQDYEEEDPKSHEGLDLHKVTTREVISKYGLEDDTVDFIGHALALHRDDNYLDEPAIDTVKRMKLYAESLARFQGGSPYIYPLYGLGELPQAFARLSAVYGGTYMLNKPECKVEFDESGKAFGVTSEGETAKCKKVVCDPSYLPDKVTKVGRVARAICIMKHPIPDTKDSHSVQIILPKKQLKRKSDMYVFCCSYAHNVAPKGKFIAFVSTEAETDKPEIELKPGIDLLGPVEETFFDIYDRYEPANAPEEDNCFVTNSYDATTHFETTVKDVLALYSKITGKELDLSVDLNAASAGESE

SEQ ID NO: 410 - protein, 264 aa, Phleum Pratense
GVVATTDAVEACTGVNVAVMVGGFPRKEGMERKDVMSKNVSIYKSQASALEAHAAPNCKVLVVANPANTNALILKEFAPSIPEKNISCLTRLDHNRALGQVSERLNVQVSDVKNVLIWGNHSSSQYPDVNHATVKTSSGEKPVRELVQDDEWLNGPFIATVQQRGAAIIKARKLSSALSAASSACDHIRDWVLGTPEGTFVSMGVYSDGSYGVPAGLIYSFPVTCSGGEWTIVQGLPIDEFSRKKMDATAQELSEEKALAYSCL

SEQ ID NO: 411 - protein, 330 aa, Phleum Pratense
MAASSRRASQLLGSAASRFLHSRGYAAAAAAPSPAVFVDKSTRVICQGITGKNGTFHTEQAIEYGTNMVGGVTPKKGGTEHLGLPVFNSVAEAKAETKANASVIYVPPPFAAAAIMEALEAELDLVVCITEGIPQHDMVKVKAALNRQSKTRLIGPNCPGIIKPGECKIGIMPGYIHKPGRIGIVSRSGTLTYEAVFQTTAVGLGQSTCVGMGGDPFNGTNFVDCLEKFVADPQTEGIVLIGEIGGTAEEDAAAFIQASKTDKPVVAFIAGLTAPPGRRMGHAGAIVSGGKGTAQDKIKALREAGVTVVESPAKIGSTMFEIFKQRGMVE

SEQ ID NO: 412 - protein, 200 aa, Phleum Pratense
MALPNQGTVDYPSFKLVIVGDGGTGKTTFVKRHLTGEFEKKYEPTIGVEVHPLDFTTNCGKIRFYCWDTAGQEKFGGLRDGYYIHGQCAIIMFDVTSRLTYKNVPTWHRDLCRVCENIPIVLCGNKVDVKNRQVKAKQVTFHRKKNLQYYEISAKSNYNFEKPFLYLARKLAGDANIHFVEAVALKPPEVTFDLAMQQQH

SEQ ID NO: 413 - protein, 401 aa, Phleum Pratense
MATKRSVGTLGEADLKGKKVFLRADLNVPLDDAQKITDDTRIRASIPTIKFLLEKGAKVILASHLGRPKGVTPKFSLKPLVPRLSELLGVEVVMANDCIGEEVEKLAAALPEGGVLLLENVRFYKEEEKNDPEFAKKLASVADLYVNDAFGTAHRAHASTEGVTKFLRPSVAGFLMQKELDYLVGAVANPKKPFAAIVGGSKVSSKIGVIESLLAKVDILILGGGMIFTFYKAQGKAVGKSLVEEDKLELATSLIETAKAKGVSLLLPTDVVVADKFAPDAESKTVSADAIPDGWMGLDVGPDSIKTFSEALDTTKTVIWNGPMGVFEFEKFAAGTDAIAKQLADLTGKGVTTIIGGGDSVAAVEKAGLADKMSHISTGGGASLELLEGKPLPGVLALDEA

SEQ ID NO: 414 - protein, 221 aa, Phleum Pratense
GVFTDKDKAAAHMKGGAKKVVISAPSKDAPMFVVGVNEDKYTSDVNIVSNASCTTNCLAPLAKIINDNFGIVEGLMTTVHSITATQKTVDGPSSKDWRGGRAASFNIIPSSTGAAKAVGKVLPELNGKLTGMSFRVPTVDVSVVDLTVRIEKAASYEDIKKAIKAASEGNLKGIMGYVEEDLVSTDFIGDSRSSIFDAKAGIALNDNFVKLVSWYDNEWGY

SEQ ID NO: 415 - protein, 358 aa, Phleum Pratense
MSAYCGKYKDELIKNAAYIGTPGKGILAADESTGTIGKRFASINVENVEDNRRALRELLFTTPGALQHISGVILFEETLYQSSKAGKPFVDILKENNVLPGIKVDKGTVELAGTDKETTTQGHDDLGKRCAKYYEAGARFAKWRAVLKIGPNEPSQLSIDQNAQGLARYAIICQENGLVPIVEPEILVDGPHDIERCAYVTEVVLAACYKALNDQHVLLEGSLLKPNMVTPGSDAKKVAPEVIAEYTVRTLQRTVPPAVPAIVFLSGGQSEEEATVNLNAMNKLQTKKPWFLSFSFGRALQQSTLKAWSGKEENVEKAQKAFLVRCKANSEATLGTYKGDATLGEGASESLHVKDYKY

SEQ ID NO: 416 - protein, 436 aa, Phleum Pratense
MASEKHFKYVILGGGVAAGYAAREFAKQGVQPGELAIISKESVAPYERPALSKGYLFPQNAARLPGFHTCVGSGGEKLLPEWYTEKGIELILSTEIVKADLASKTLTSAAGATFTYETLLIATGSSTIKLTDFGVQGAEANNILYLRDINDADKLVAAMQAKKDGKAVVVGGGYIGLELSAALKLNNFDVTMVYPEPWCMPRLFTAGIAHFYEGYYASKGINIVKGTVASGFDADANGDVAVVKLKDGRVLDANIVIVGVGGRPLTGLFKGQVDEEKGGLKTDTFFETSVAGVYAIGDVASFPMKLYNEPRRVEHVDHARKSAEQAVKAIKAKESGETVAEYDYLPYFYSRSFDIAWQFYGDNVGESVLFGDNDPAAAKAKFGTYWVKDGKVVGVFLEGGSADENQAIAKVARAQPLVAANLGELGKEGLDFAAKI

SEQ ID NO: 417 - protein, 570 aa, Phleum Pratense
MAGGGVEDVYGEDRATEEQFVTPWSFSVASGHSLLRDPRHNKGLAFSEAERDAHYLRGLLPPAIVSQEHQEKKIMHNLRQYTVPLQRYIAMMDLQERNERLFYKLLIDNVEELLPVVYTPVVGEACQKYGSIYRRPQGLYISLKDKGKVLEVLKNWPERSIQVIVVTDGERILGLGDLGCQGMGIPVGKLSLYTALGGVRPSACLPITIDVGTNNQTLLDDEYYIGLKQRRATGEEYHELLQEFMNAVKQNYGEKVLVQFEDFANHNAFDLLAKYSKSHLVFNDDIQGTASVVLAGLLAALKVIGGGLADQTYLFLGAGEAGTGIAELIALEMSKHTDLPLDDCRKKIWLVDSKGLLVESRKESLQHFKKPFAHEHEPLTTLLEAVQSLKPTVLIGTSGVGKTFTQEVVEAMASFNEKPVIFSLSNPTSHSECTAEEAYTWTKGTAVFASGSPFDPVEYEGKTYVPGQSNNAYVFPGFGLGVVISGAIRVHDDMLLAASEALAEQVSQENFDKGLIFPPFTNIRKISANIAAKVAAKAYDLGLASRLPRPDDLVKYAESCMYTPLYRSYR

SEQ ID NO: 418 - protein, 337 aa, Phleum Pratense
MAPIKIGINGFGRIGRLVARVALQCPDVELVAVNDPFITTDYMTYMFKYDTVHGQWKHHDVKVKDAKTLLFGEKEVAVFGCRNPEEIPWGAAGADYVVESTGVFTDKDKAAAHIKGGAKKVIISAPSKDAPMFVCGVNEKEYTSDITIVSNASCTTNCLAPLAKVINDRFGIVEGLMTTVHAMTATQKTVDGPSSKDWRGGRAASFNIIPSSTGAAKAVGKVLPVLNGKLTGMAFRVPTVDVSVVDLTVRLEKAATYEQIKAAIKEESEGNLKGILGYVDEDLVSTDFQGDSRSSIFDAKAGIALNDNFVKLVSWYDNEWGYSTRVVDLIRHIHATK

SEQ ID NO: 419 - protein, 380 aa, Phleum Pratense
MSFSWICACVRAAAVAWEAGKPLSIEEVEVAPPQAMEVRVKILFTALCHTDVYFWEAKGQTPVFPRIFGHEAGGIVESVGEGVTDVAPGDHVLPVFTGECKECRHCKSAESNMCDLLRINTDRGVMISDGKSRFSIDGKPIFHFVGTSTFSEYTVMHVGCVAKINPEAPLDKVCVLSCGISTGLGASINVAKPPKGSTVAIFGLGAVGLAAAEGARIAGASRIIGIDLNANRFEEARKFGCTEFVNPKDHTKPVQEVLAEMTDGGVDRSVECTGNINAMIQAFECVHDGWGVAVLVGVPHKDAEFKTHPMNFLNERTLKGTFFGNFKPRTDLPNVVEMYMKKELEVEKFITHSVTFSEINKAFDLMAKGEGIRCIIRMEH

SEQ ID NO: 420 - protein, 255 aa, Phleum Pratense
MAPRKFFVGGNWKCNGASDDVKKIVTVLNEAEVPSEDAVEVVVSPPFVFLQQAKALLRPDFAVAAQNCWVRKGGAFTGEISAEMLVNLQVPWVILGHSERRALLSESNDFVADKVAYALAQGLKVIACIGETLEQREAGTTMEVVAAQTKAIAEKISDWTNVVLAYEPVWAIGTGKVASRAQAQEVHDGLRKWLHANVGPAVAESTRIIYGGSVNGANCKELAAQPDLDGFLVGGASLKPEFVDIIKSATVKSSS

SEQ ID NO: 421 - protein, 275 aa, Phleum Pratense
GCRAGGNSATEPYIAGHHLLLAHAAAVKIYRDKYQPAQQGKIGILLDFVWYEPLTYNTEDEFAAHRAREFTLGWFMHPITYGHYPETMQRLVADRLPNFTDEQTRLLQGSADIVGVNHYTTYYAKNHENLTHMSYANDWQVQLVYERNGIPIGKQGYSKWLYVVPWGFYKAVMHVKDKYRNPLMIIGENGIDQSGSDTLPHALYDKFRIDYFDQYLHELKRATDDGARVTGYFAWSLLDNFEWRMGFTSKFGIVYVDRKTFTRYPKDSTRWFRKV

SEQ ID NO: 422 - protein, 62 aa, Phleum Pratense
KTNKDGVDYYHRLINYMLANKITPYVVLYHYDLPEVLNNQYNGWLSPRVVPDFAYFADFCFK

SEQ ID NO: 423 - protein, 62 aa, Phleum Pratense
LTRHSFPKGFVFGTASSAYQVEGNALQYGRGPCIWDTFLKFPGATPDNATANVTVDEYHRYM

SEQ ID NO: 424 - protein, 235 aa, Phleum Pratense
MATDAAAPAAASKWNLLTFDTEEDVAVSLAKYTAELSGKFAAERGAFTVVLSGGTLIDTLRKLAEPPYLETVQWSKWHVFWVDERVVPKDHVDSNYKLAVDGLLSKVPIPTDQVYAINDTLSAEGAAADYETVLKQLVKNGVLAMSTATGFPRFDLMLLGMGPDGHLASLFPGHPLLNENQKWVTHIMDSPKPPPQRITFTFPVIKSSAYVAMVVTGPGEASAVKKVLSDDKTLP

SEQ ID NO: 425 - protein, 101 aa, Phleum Pratense
DGHLASLFPGHPLLNENQKWVTHIMDSPKPPPQRITFTFPVIKSSAYVAMVVTGPGEASAVKKVLSDDKTLPLLPTEMAILQDGEFTWFTDKQAVSMLQNK

SEQ ID NO: 426 - protein, 536 aa, Phleum Pratense
STNVARAEDPYVFFEWHVTYGTKTVLGVPQKVILINGEFPGPRINCSSNNNIVVNVFNQLDQPLLFTWNGIQHRKNSWQDGLPGTNCPVAPGTNFTYKWQPKDQIGSFFYFPSIGMQRTVGGYGLISVVSRLLIPVPFDPPADDLQVIIGDWYTKDHAVMASLLDAGKSFGRPAGVLINGRGGKDATNPPMFTFEAGKTYRLRVCNVGIKSSLNFRIQGHDMRLVEMDGSHTLQDSYDSLDVHVGHCFSVLVDADQKPADYLMVASTRFIADGSSASAVIRYAGSNTPPAANVPEPPAGWAWSLNQWRSFRWNLTASAARPNPQGSYHYGQINITRTIKLMITRGHLDGKLKYGFNGVSHVDADTPLKLAEYFNVSDQVFKYNQMGDAPPGVNGPMHVTPNVITAEFRTFIEVVFENPEKSMDSLHIDGYAFFAVGMGPGKWKPELRKTYNLLDAVSRHSIQVYPRSWSAVMLTFDNAGMWNVRSNVWERHYLGEQLYISVISPARSLRDEYNFPENALRCGKVVGLPLPPSYLPA

SEQ ID NO: 427 - protein, 559 aa, Phleum Pratense
MATTTTRGTAAAGGVLLLALLLLSTNVARAEDPYVFFEWHVTYGTKTVLGVPQKVILINGEFPGPRINCSSNNNIVVNVFNQLDQPLLFTWNGIQHRKNSWQDGLPGTNCPVAPGTNFTYKWQPKDQIGSFFYFPSIGMQRTVGGYGLISVVSRLLIPVPFDPPADDLQVIIGDWYTKDHAVMASLLDAGKSFGRPAGVLINGRGGKDATNPPMFTFEAGKTYRLRVCNVGIKSSLNFRIQGHDMRLVEMDGSHTLQDSYDSLDVHVGHCFSVLVDADQKPADYLMVASTRFIADGSSASAVIRYAGSNTPPAANVPEPPAGWAWSLNQWRSFRWNLTASAARPNPQGSYHYGQINITRTIKLMITRGHLDGKLKYGFNGVSHVDADTPLKLAEYFNVSDQVFKYNQMGDAPPGVNGPMHVTPNVITAEFRTFIEVVFENPEKSMDSLHIDGYAFFAVGMGPGKWKPELRKTYNLLDAVSRHSIQVYPRSWSAVMLTFDNAGMWNVRSNVWERHYLGEQLYISVISPARSLRDEYNFPENALRCGKVVGLPLPPSYLPA

SEQ ID NO: 428 - protein, 295 aa, Phleum Pratense
TKDHAVMASLLDAGKSFGRPAGVLINGRGGKDATNPPMFTFEAGKTYRLRVCNVGIKSSLNFRIQGHDMRLVEMDGSHTLQDSYDSLDVHVGHCFSVLVDADQKPADYLMVASTRFIADGSSASAVIRYAGSNTPPAANVPEPPAGWAWSLNQWRSFRWNLTASAARPNPQGSYHYGQINITRTIKLMITRGHLDGKLKYGFNGVSHVDADTPLKLAEYFNVSDQVFKYNQMGDAPPGVNGPMHVTPNVITAEFRTFIEVVFENPEKSMDSLHIDGYAFFAVGMGPGKWKPELRK

SEQ ID NO: 429 - protein, 264 aa, Phleum Pratense
MSPAEPTREESVYMAKLAEQAERYEEMVEFMERVAKATGGAGPGEELSVEERNLLSVAYKNVIGARRASWRIISSIEQKEEGRGNDAHATTIRSYRSKIEAELAKICDGILALLDSHLVPSAGAAESKVFYLKMKGDYHRYLAEFKSGAERKEAAESTMNSYKAAQDIALADLAPTHPIRLGLALNFSVFYYEILNSPDRACNLAKQAFDEAISELDSLGEESYKDSTLIMQLLRDNLTLWTSDTNEDGGDEIKEAPAPKESGD

SEQ ID NO: 430 - protein, 305 aa, Phleum Pratense
MDACRLLLLLLLGLLGLLAPLASAQLSREFYKASCPDAEKIVAAVIEKKLKEDPGTAAGLLRLLFHDCFANGCDASILIDPLSNQSAEKEAGPNISVRGFEVIDDIKKELEAKCPKTVSCADIVALGTRDAVRISGGPAYEVPTGRRDSLVSNREEADNNLPGPDIPIPKLTSEFLSRGFTPEEMVVLLAGGHSIGKVRCIFIEPDATPMDPGYQASISKLCDGPNRDTGFVNMDEHNPNVIDSSYFANVLAKKMPLTVDRLLGLDSKTTPIIKNMLNKPNDFMPTFAKAMEKLSVLKVITGKDG

SEQ ID NO: 431 - protein, 283 aa, Phleum Pratense
MDRNPVAKNAGKFMTLAGVLDYAKASNISGILIGIEHAAYLATRGLDVVDAVSNALIKSGYDKETKQQVFIQSEDPPVLSAFKKFPKFNRVFEIEFDIRDVSKPSVVEIKEFANAVKLRRSSAAQVDGFYLTGFNAVVERLRDADIQVHVGVLKNEFMSLAFDYWADPMVEIATDTWSVLADGLVTEFPSTAAAYFRSPCSDIKRNMSYTIKPGEPGALVDMAAYGALPPAPPPAPVLEPADVHRQPLPLCPTEPMFRTFRCRLPPKETGKNAEYTANLAADG

SEQ ID NO: 432 - protein, 353 aa, Phleum Pratense
MARLLFPLPIAAAAVSASSIHLAASRFRLPVVSAARRGTLFGGRVAVRAPARLATRGVSAGAEAGGSAARAGTVIGPEEALEWVKNDRRRLLHVVYRVGDLDKTIKFYTECLGMKLLRKRDIPEERYTNAFLGYGPEDSHFVVELTYNYGVESYDIGSGFGHFGIAVEDVEKTVELIKAKGGTVTREPGPVKGGKSVIAFIEDPDGYKFELIERGPTPEPLCQVMLRVGDLDRAIKFYEKAFGMELLRRKDNPQYKYTIAMMGYGPEDKNAVLELTYNYGVKEYDKGNAYAQIAIGTDDVYKTAEVVRQNGGQITREPGPLPGISTKITACTDPDGWKSVFVDNLDFLKELEE

SEQ ID NO: 433 - protein, 340 aa, Phleum Pratense
MRRLSLILLAAAALLAAAVSAEPGPAPKLSPDFYSQTCPRAERIIAEVVQSKQMANPTTAAGVLRVFFHDCFVSGCDASVLIAPTHYAKSEKDADINHSLPGDAFDAVVRSKLALELECPGVVSCADILAIASRVLVTMTGGPRYPVPLGRKDSLSSNPAAPDVELPHSNFTVGRIIELFTAKGFTVQEMVALSGAHTLGFSHCQEFASRIYNYRDKGGKPAPFDPSMNPTYAKGLQAACQDYQKDPTIAAFNDIMTPGKFDNMYYVNIERGLGLLSTDEDMWSDMRTKPFVQRYAANNTDFFEDFAKAIEKLSMYGVKTGADGEIRRRCDAFNSGPNIQ

SEQ ID NO: 434 - protein, 359 aa, Phleum Pratense
AMAVDLTPRQPTKAYGGDGGAYYEWSPAELPMLGVASIGAAKLSLAAGGMSLPSYSDSAKVAYVLQGKGTCGIVLPEATKEKVVAIKEGDALALPFGVVTWWHNTPESSTELVVLFLGDTSKGHTPGKFTNFQLTGATGIFTGFSTEFVARAWDLDQDAAASLVSTQPGTGIVKLAPGHKMPVARAEDRKGMALNCLEAKLDVDIPNGGRVVVLNTVNLPLVKEVGLGADLVRIDAHSMCSPGFSCDSAYQVTYIVRGSGRVQVVGPDGKRVLETRIEGGSLFIVPRFHVVSKIADASGMEWFSIITTPNPIFSHLAGKTSVWKAISPEVLEAAFNTTPEMEKLFRSKRLDSEIFFAPS

SEQ ID NO: 435 - protein, 956 aa, Phleum Pratense
MSSAKQVLEPAFQGAGQKPGTEIWRIENFNPVPLPKSDYGKFYCGDSYIVLQTTCNKGGAYLFDIHFWIGKDSSQDEAGTSAIKTVELDTMLGGRAVQHREPQGYESDKFLSYFKPCIIPLEGGFASGFKTPEEEKFETRLYICKGKRAIRVKEVPFARSSLNHDDVFILDTEKKIYQFNGANSNIQERAKALEVIQHLKDKYHEGVCDVAIVDDGKLQAESDSGEFWVVFGGFAPIGKKTVSDDDVILETSPTKLYSINNGKLKLEDIVLTKSILENTKCFLLDCGSELFVWVGRVTQVDDRKAASAAVEEFIVKQNRPKTTRVTQVIQGYENHTFKSLFESWPVSSTGNASTEEGRGKVAALLKKKGDVKGASKNSTPVNEEVPPLLEGSGKLEVWCVDGSAKTALPKEDLGKFHSGDCYIVLYTYHSGEKREEFYLTYWIGKDSVLEDQHMALQIATTIWNSMKGRPVLGRIYQGKEPPQFIALFQPMVILKGGISSGYKKSIEENGLKDETYSGTGIALVHIHGTSIHNNKTLQVDAVSISLSSTDCFVLQSGNSMFTWIGNTSSYEQQQWAAKVAEFLKPGASVKHCKEGTESSAFWSALGGKQNYTSKNATQDVLREPHLYTFSFRNGKLEVTEVFNFSQDDLLTEDVMILDTHAEVFVWMGQCVDTKEKQTAFETGQKYVEHAVNFEGLSPDVPLYKVSEGNEPCFFRTYFSWDNTRSVIHGNSFQKKLSLLFGMRSESGSKGSGDGGPTQRASALAALSSAFNPSSQDKQSNDRPKSSGDGGPTQRASALAALSSSLNPSSKPKSPHSQSRSGQGSQRAAAVAALSNVLTAEGSTLSPRNDAEKTELAPSEFHTDQDAPGDEVPSEGERTEPDVSQEETANENGGETTFSYDRLISKSTDPVRGIDYKRRETYLSDSEFETVFGVTKEEFYQQPRWKQELQKRKADLF

SEQ ID NO: 436 - protein, 563 aa, Phleum Pratense
MASHIVGYPRMGPKRELKFALESFWDGKSSAEDLEKVATDLRASIWKQMSEAGIKYIPSNTFSYYDQVLDTTAMLGAVPDRYSWTGGEIGHSTYFSMARGNATVPAMEMTKWFDTNYHFIVPELGPETKFSYASHKAVSEYKEAKALGVDTVPVLVGPVSYLLLSKAAKGVEKSFSLLSLLGGILPIYKEVVAELKAAGASWIQFDEPTLVKDLAAHELAAFSSAYAELESSLSGLNVLIETYFADVPAESYKTLTSLSGVTAYGFDLVRGTKTLDLLKSVGIPSGKYLFAGVVDGRNIWADDLAASLSTLESLEAIVGKDKLVVSTSCSLMHTAVDLVNETKLDSEIKSWLAFAAQKVVEVNALGKALVGLKDEAYFAANAAAQASRRSSPRVNNEEVQKAAAALKGSDHRRATTVSARLDAQQKKLNLPVLPTTTIGSFPQTMDLRRVRREYKAKKISEEAYVSAIKEEISKVVKIQEELDIDVLVHGEPERNDMVEYFGEQLSGFAFTANGWVQSYGSRCVKPPIIYGDVSRPNPMTVFWSKMAQSMTPRPMKGMLTGPV

SEQ ID NO: 437 - protein, 796 aa, Phleum Pratense
QEVAGDVRMTDTRADEAERGITIKSTGISLYYEMSEESLASYKGDRDGNDYLINLIDSPGHVDFSSEVTAALRITDGALVVVDCIEGVCVQTETVLRQALGERIRPVLTVNKMDRCFLELQVDGEEAYQTFSRVIENANVIMATYEDALLGDVQVYPEKGTVAFSAGLHGWAFTLTNFAKMYASKFGVDESKMMERLWGENFFDPATKKWTSKNTGSGTCKRGFVQFCYEPIKQIIEICMNDQKDKLWPMLKKLGVTMKNDEKDLMGKALMKRVMQAWLPASRALLEMMVYHLPSPSKAQRYRVENLYEGPLDDVYANAIRNCDPEGPLMLYVSKMIPASDKGRFFAFGRVFAGRVATGMKVRIMGPNFVPGQKKDLYTKSVQRTVIWMGKKQESVEDVPCGNTVALVGLDQFITKNATLTGEKEVDACPIRAMKFSVSPVVRVAVQCKVASDLPKLVEGLKRLAKSDPMVLCSIEESGEHIIAGAGELHLEICLKDLQDDFMGGAEIIVSPPVVSFRETVLDKSCRTVMSKSPNKHNRLYMEARPLEEGLPEAIDEGRIGPRDDPKVRSKILSEEFGWDKDLAKKIWCFGPETTGPNMVVDMCKGVQYLNEIKDSVVAGFQWASKEGALADENMRGICFEVCDVVLHTDAIHRGGGQVIPTARRVIFASQLTAKPRLLEPVYLVEIQAPEGALGGIYGVLNQKRGHVFEEMQRPGTPLYNIKAYLPVIESFGFSATLRAATSGQAFPQCVFDHWDVMNSDPLEVDSQSFNLVKEIRKRKGLKEQMTPLSDFEDKL

SEQ ID NO: 438 - protein, 260 aa, Phleum Pratense
MSTAEATREENVYMAKLAEQAERYEEMVEFMEKVAKTADVGELTVEERNLLSVAYKNVIGARRASWRIISSIEQKEESRGNEAYVASIKEYRTRIETELSKICDGILKLLDSHLVPSATAAESKVFYLKMKGDYHRYLAEFKAGAERKEAAENTLVAYKSAQDIALADLPTTHPIRLGLALNFSVFYYEILNSPDRACNLAKQAFDEAIAELDSLGEESYKDSTLIMQLLRDNLTLWTSDNADEGGDEIKEASKPEGEGH

SEQ ID NO: 439 - protein, 264 aa, Phleum Pratense; identical to SEQ ID NO: 429

SEQ ID NO: 440 - protein, 202 aa, Phleum Pratense
MAVKVYVVYYSMYGHVGKLAEEIKKGASSVEGVEVKVWQVPEILSEEVLGKMGAPPKTDVPIISPQELAEADGILFGFPTRFGMMASQMKAFFDATGGLWREQSLAGKPAGVFFSTGTQGGGQETTPLTAVTQLTHHGMVFVPVGYTFGAKMFDMEKVQGGSPYGAGTFAGDGSRWPSEMELEHAFHQGKYFAGIAKKLKGS

SEQ ID NO: 441 - protein, 832 aa, Phleum Pratense
MSAADKVKPAASPAAEDPAAIAGNISYHAHYSPHFSPLAFGPEPAYFATAESVRDHLLQRWNDTYLHFHKTDPKQTYYLSMEYLQGRALTNAVGNLGITGAYAEAVKKFGYELEALAGQERDMALGNGGLGRLAACFLDSMATLNLPAWGYGLRYRYGLFKQRIAKEGQEEIAEDWLEKFSPWEIVRHDVVYPVRFFGHVEILPDGRRKSAGGEVLNALAYDVPIPGYKTKNAISLRLWDAKASAEDFNLFQFNDGQYESAAQLHSRAQQICAVLYPGDATEEGKLLRLKQQFFLCSASLQDIIFRFKERKSDRVSGKWSEFPSKVAVQMNDTHPTLAIPELMRLLMDEEGLGWDEAWDVTNKTVAYTNHTVLPEALEKWSQSVMRKLLPRQMEIIEEIDKRFREMVISTRKDMEGKLDSMSVLDNSPQKPVVRMANLCVVSAHTVNGVAELHSNILKEELFADYVSIWPKKFQNKTNGITPRRWLRFCNPELSEIVTKWLKTDQWTSNLDLLTGLRKFADDEKLHAEWAAAKLASKKRLAKHVLDATGVTIDPTSLFDIQIKRIHEYKRQLMNILGAVYRYKKLKEMSAEEKQKVTPRTVMVGGKAFATYTNAKRIVKLVNDVGAVVNNDPDVNKYLKVVFIPNYNVSVAEVLIPGSELSQHISTAGMEASGTSNMKFSLNGCVIIGTLDGANVEIREEVGEDNFFLFGAKADQVAGLRKDRENGLFKPDPRFEEAKQYIRSGTFGTYDYTPLLDSLEGNSGFGRGDYFLVGYDFPSYIDAQARVDEAYKDKKRWIKMSILNTAGSGKFSSDRTIDQYAKEIWGITANPVP

SEQ ID NO: 442 - protein, 143 aa, Phleum Pratense
MAANPRVFFDVTIGGAPAGRIVMELYADVVPKTAENFRALCTGEKGVGKMGKPLHYKGSSFHRVIPGFMCQGGDFTAGNGTGGESIYGAKFADENFVKKHTGPGVLSMANAGPGTNGSQFFLCTAKTAWLDGKHVVFGQVVEG

SEQ ID NO: 443 - protein, 171 aa, Phleum Pratense
AANPRVFFDVTIGGAPAGRIVMELYADVVPKTAENFRALCTGEKGVGKMGKPLHYKGSSFHRVIPGFMCQGGDFTAGNGTGGESIYGAKFADENFVKKHTGPGVLSMANAGPGTNGSQFFLCTAKTAWLDGKHVVFGQVVEGMDVVKAVEKVGSQSGRCSKPVVIADCGQL

SEQ ID NO: 444 - protein, 24 aa, Phleum Pratense
TIQSVKARQIFDSRGNPTVEVDVC

SEQ ID NO: 445 - protein, 60 aa, Phleum Pratense
SDGTFARAAVPSGASTGVYEALELRDGGSDYLGKGVLKAVDNVNSIIGPALIGKDPTEQT

SEQ ID NO: 446 - protein, 170 aa, Phleum Pratense
DNFMVHQLDGTKNEWGWCKQKLGANAILAVSLAVCKAGALVKKIPLYQHIANLAGNKQLVLPVPAFNVINGGSHAGNKLAMQEFMILPTGASSFKEAMKMGVEVYHNLKSVIKKKYGQDATNVGDEGGFAPNIQENKEGLELLKTAIEKAGYTGKVVIGMDVAASEFYGE

SEQ ID NO: 447 - protein, 21 aa, Phleum Pratense
DQTYDLNFKEENNDGSQKISG

SEQ ID NO: 448 - protein, 29 aa, Phleum Pratense
LKNVYKSFVSEYPIVSIEDPFDQDDWVHY

SEQ ID NO: 449 - protein, 145 aa, Phleum Pratense
FVSEYPIVSIEDPFDQDDWVHYAKMTEEIGEQVQIVGDDLLVTNPTRVAKAIAEKSCNALLLKVNQIGSVTESIEAVKMSKRAGWGVMTSHRSGETEDTFIADLAVGLSTGQIKTGAPCRSERLAKYNQLLRIEEELGAAAVYAG

SEQ ID NO: 450 - protein, 25 aa, Phleum Pratense
MFNGEKINSTENRSVLHVALRAPRD

SEQ ID NO: 451 - protein, 48 aa, Phleum Pratense
SVGIGGSFLGPLFVHTALQTDPEAAESAKGRQLRFLANVDPVDVARSI

SEQ ID NO: 452 - protein, 32 aa, Phleum Pratense
DLDPETTLVVVVSKTFTTAETMLNARTIKEWI

SEQ ID NO: 453 - protein, 43 aa, Phleum Pratense
LVKEFGIDPNNAFAFWDWVGGRYSVCSAVGVLPLSLQYGFPIV

SEQ ID NO: 454 - protein, 145 aa, Phleum Pratense
ASFEKNIPVLLGLLSVWNVSFLGYPARAILPYSQALEKLAPHIQQLSMESNGKGVSIDGVPLPYEAGEIDFGEPGTNGQHSFYQLIHQGRVIPCDFIGVIKSQQPVYLKGETVSNHDELMSNFFAQPDALAYGKTPEQLRSENVS

SEQ ID NO: 455 - protein, 18 aa, Phleum Pratense
LIPHKTFKGNRPSLSFLL

SEQ ID NO: 456 - protein, 53 aa, Phleum Pratense
SLSAYEIGQLLAIYEHRIAVQGFIWGINSFDQWGVELGKSLASQVRKQLHASR

SEQ ID NO: 457 - protein, 27 aa, Phleum Pratense
LKEQLELDKDDESLRRWKEQLLGQVDT

SEQ ID NO: 458 - protein, 19 aa, Phleum Pratense
NIVSGLKYTNTVWKTGVRV

SEQ ID NO: 459 - protein, 24 aa, Phleum Pratense
EETTPAGIFARGSYSAKLKFVDDD

SEQ ID NO: 460 - protein, 15 aa, Phleum Pratense
KLMKTIFDFESIKKL

SEQ ID NO: 461 - protein, 60 aa, Phleum Pratense
FCFDGLHGVAGAYAKRMFVDELGASESSLLNCVPKEDFGGGHPDPNLTYAKELVERMGLG

SEQ ID NO: 462 - protein, 129 aa, Phleum Pratense
VEPPEFGAAADGDADRNMVLGKRFFVTPSDSVAIIAANAVQSIPYFASGLKGVARSMPTSAALDVVAKNLNLKFFEVPTGWKFFGNLMDAGMCSVCGEESFGTGSDHIREKDGIWAVLAWLSIIAYKNK

SEQ ID NO: 463 - protein, 39 aa, Phleum Pratense
KLVSVEDIVLQHWATYGRHYYTRYDYENVDAEAAKELMA

SEQ ID NO: 464 - protein, 69 aa, Phleum Pratense
DVAEVVSADEFEYKDPVDGSVSKHQGIRYLFGDGSRLVFRLSGTGSVGATIRIYIEQYEKDSSKTGRES

SEQ ID NO: 465 - protein, 15 aa, Phleum Pratense
DALSPLVDVALKLSK

SEQ ID NO: 466 - protein, 40 aa, Phleum Pratense
KLRGLIAEKNCAPLMLRIAWHSAGTFDVATKTGGPFGTMR

SEQ ID NO: 467 - protein, 79 aa, Phleum Pratense
AELAHGANAGLDIAVRLLEPIKEQVPILSYADFYQLAGVVAVEITGGPEVPFHPGRQDKTEPPPEGRLPDATLGSDHLR

SEQ ID NO: 468 - protein, 103 aa, Phleum Pratense
AQMGLSDQDIVALSGGHTLGRCHKERSGFEGAWTANPLIFDNSYFTELLTGEKEGLLQLPTDKTLLTDPAFRPLVEKYAADEDAFFADYAEAHLKLSELGFGE

SEQ ID NO: 469 - protein, 40 aa, Phleum Pratense; identical to SEQ ID NO: 466

SEQ ID NO: 470 - protein, 79 aa, Phleum Pratense; identical to SEQ ID NO: 467

SEQ ID NO: 471 - protein, 104 aa, Phleum Pratense
AQMGLSDQDIVALSGGHTLGRCHKERSGFEGAWTANPLIFDNSYFTELLTGEKEGLLQLPTDKTLLTDPAFRPLVEKYAADEDAFFADYAEAHLKLSELGFGEA

SEQ ID NO: 472 - protein, 75 aa, Phleum Pratense
PFHPGREDKPQPPPEGRLPDATKGSDHLRQVFGKQMGLSDQDIVALSGGHTLGRCHKERSGFEGPWTKNPLKFDN

SEQ ID NO: 473 - protein, 28 aa, Phleum Pratense
DKTLLTDPVFRPLVEKYAADEKAFFEDY

SEQ ID NO: 474 - protein, 78 aa, Phleum Pratense
TKALLDKLAVLKLNGGLGTTMGCTGPKSVIEVRNGFTFLDLIVLQIESLNKKYGSNVPLLLMNSFNTHEDTLKIVEKY

SEQ ID NO: 475 - protein, 15 aa, Phleum Pratense
IHTFNQSQYPRVVAD

SEQ ID NO: 476 - protein, 60 aa, Phleum Pratense
PSKGKTDKDGWYPPGHGDIFPSLMNSGKLDLLLSQGKEYVFIANSDNLGAIVDMKILNHL

SEQ ID NO: 477 - protein, 136 aa, Phleum Pratense
KQNEYCMEVTPKTLADVKGGTLISYEGRVQLLEIAQVPDAHVDEFKSIEKFKIFNTNNLWVNLKAIKRLVEADALKMEIIPNPKEVDGVKVLQLETAAGAAIRFFDHAIGINVPRSRFLPVKATSDLQLVQSDLYT

SEQ ID NO: 478 - protein, 49 aa, Phleum Pratense
ARTDPSNPSIELGPEFKKVGSFLGRFKSIPSIVELDSLKVSGDVWFGSG

SEQ ID NO: 479 - protein, 18 aa, Phleum Pratense
PGVKLEIPDGAVLENKDI

SEQ ID NO: 480 - protein, 72 aa, Phleum Pratense
GDEMTRVFWQSIKEKLIFPFLDLDIKYYDLGVLHRDATDDKVTVEAAEATLKYNVAIKCATITPDEDRVKEF

SEQ ID NO: 481 - protein, 62 aa, Phleum Pratense
LKQMWRSPNGTIRNIINGTVFREPIICKNVPKLVPPHLPKPICIGRHAFGDQYRATDAVLKG

SEQ ID NO: 482 - protein, 32 aa, Phleum Pratense
DLEVFNFTGAGGVALAMYNTDESIQGFAEASM

SEQ ID NO: 483 - protein, 162 aa, Phleum Pratense
IAYEKKWPLYLSTKNTILKKYDGRFKDIFQAVYEADWKSKYEAAGIWYEHRLIDDMVAYALKSEGGYVWACKNYDGDVQSDFLAQGFGSLGLMTSVLMCPDGKTIEAEAAHGTVTRHFRVHQKGGETSTNSIASIFAWTRGLAHRAKLDDNARLLDFTQKLE

SEQ ID NO: 484 - protein, 21 aa, Phleum Pratense
ACVGTVESGKMTKDLALLVHG

SEQ ID NO: 485 - protein, 19 aa, Phleum Pratense
RGDYLNTEEFIDAVAAELQ

SEQ ID NO: 486 - protein, 16 aa, Phleum Pratense
ETYACSPATERGRGIL

SEQ ID NO: 487 - protein, 28 aa, Phleum Pratense
EHAYPTTVARISPNGEWVASADVSGCVR

SEQ ID NO: 488 - protein, 26 aa, Phleum Pratense
RIVVSGDGKGKSLVRAFMWDSGSTVG

SEQ ID NO: 489 - protein, 76 aa, Phleum Pratense
FDGHSKRVLSCDFKPTRPFRIVTCGEDFLANYYEGPPFKFKHSIRDHSNFVNCIRYSPDGSKFITVSSDKRGLIYD

SEQ ID NO: 490 - protein, 37 aa, Phleum Pratense
GELSSEDSHTGSIYAVSWSADSKQVLTVSADKTAKVW

SEQ ID NO: 491 - protein, 27 aa, Phleum Pratense
GIGGVDDMLVGCLWQNDHLVTVSLGGT

SEQ ID NO: 492 - protein, 20 aa, Phleum Pratense
SPDGTEAIVGAQDGKLRIYS

SEQ ID NO: 493 - protein, 17 aa, Phleum Pratense
GDTLTEEAVLERHRGAI

SEQ ID NO: 494 - protein, 18 aa, Phleum Pratense
YSPDVSMFASADANREAV

SEQ ID NO: 495 - protein, 23 aa, Phleum Pratense
REIKLKNMLFHTARINCLAWSPD

SEQ ID NO: 496 - protein, 19 aa, Phleum Pratense
DKPASSRITIKGAHLGGVH

SEQ ID NO: 497 - protein, 37 aa, Phleum Pratense
PFDGQKPGTSGLRKKVTVFQQPHYLANFVQSTFNALP

SEQ ID NO: 498 - protein, 46 aa, Phleum Pratense
TIVVSGDGRYFSKDAVQIITKMAAANGVRRVWVGQDSLLSTPAVSA

SEQ ID NO: 499 - protein, 39 aa, Phleum Pratense
DGSKATGAFILTASHNPGGPTEDFGIKYNMGNGGPAPES

SEQ ID NO: 500 - protein, 18 aa, Phleum Pratense
EYLIAEDLPDVDISALGV

SEQ ID NO: 501 - protein, 28 aa, Phleum Pratense
FDVDVFDSATDYIKLMKTIFDFESIKKL

SEQ ID NO: 502 - protein, 60 aa, Phleum Pratense; identical to SEQ ID NO: 461

SEQ ID NO: 503 - protein, 129 aa, Phleum Pratense; identical to SEQ ID NO: 462

SEQ ID NO: 504 - protein, 39 aa, Phleum Pratense; identical to SEQ ID NO: 463

SEQ ID NO: 505 - protein, 69 aa, Phleum Pratense; identical to SEQ ID NO: 464

SEQ ID NO: 506 - protein, 15 aa, Phleum Pratense
DALSPLVDVALKLSK

SEQ ID NO: 507 - protein, 67 aa, Phleum Pratense
TPVMDSLKNGAPEKWTLVKAHGTAVGLPSDDDMGNSEVGHNALGAGRIFAQGAKLVDAALASGKIWE

SEQ ID NO: 508 - protein, 64 aa, Phleum Pratense
GTLHLIGLLSDGGVHSRLDQVQLLVKGASERGAKRIRLHILTDGRDVLDGSSVGFVETLENDLA

SEQ ID NO: 509 - protein, 49 aa, Phleum Pratense
LREKGVDAQVASGGGRMYVTMDRYENDWDVVKRGWDAQVLGEAPYKFKS

SEQ ID NO: 510 - protein, 44 aa, Phleum Pratense
DQYLPAFVIVDESGKSVGPIVDGDAVVTFNFRADRMVMLAKALE

SEQ ID NO: 511 - protein, 30 aa, Phleum Pratense
DFDKFDRVRVPKIKYAGMLQYDGELKLPNK

SEQ ID NO: 512 - protein, 48 aa, Phleum Pratense
LVSPPLIERTSGEYLVKNGVRTFACSETVKFGHVTFFWNGNRSGYFDE

SEQ ID NO: 513 - protein, 107 aa, Phleum Pratense
KEEYIEIPSDSGITFNEQPKMKALEIAEKTRDAILSGKFDQVRINLPNGDMVGHTGDIEATVVACKAADEAVKIVLDAVEQVGGIYLVTADHGNAEDMVKRNKSGQP

SEQ ID NO: 514 - protein, 24 aa, Phleum Pratense
GSIQILTSHTLQPVPVAIGGPGLH

SEQ ID NO: 515 - protein, 24 aa, Phleum Pratense
TPGLANVAATVMNLHGFQAPDDYE

SEQ ID NO: 516 - protein, 50 aa, Phleum Pratense
MDEEYDVIVLGTGLKECILSGLLSVDGLKVLHMDRNDYYGGESTSLNLTK

SEQ ID NO: 517 - protein, 24 aa, Phleum Pratense
SKEYNVDMVPKFMMANGALVRVLI

SEQ ID NO: 518 - protein, 19 aa, Phleum Pratense
TSVTKYLNFKAVDGSFVYN

SEQ ID NO: 519 - protein, 38 aa, Phleum Pratense
GKIHKVPATDVEALKSNLMGLFEKRRARKFFIYVQDYE

SEQ ID NO: 520 - protein, 26 aa, Phleum Pratense
KYGLEDDTVDFIGHALALHRDDNYLD

SEQ ID NO: 521 - protein, 55 aa, Phleum Pratense
KRMKLYAESLARFQGGSPYIYPLYGLGELPQAFARLSAVYGGTYMLNKPECKVEF

SEQ ID NO: 522 - protein, 49 aa, Phleum Pratense
GKAFGVTSEGETAKCKKVVCDPSYLPDKVTKVGRVARAICIMKHPIPDT

SEQ ID NO: 523 - protein, 54 aa, Phleum Pratense
KQLKRKSDMYVFCCSYAHNVAPKGKFIAFVSTEAETDKPEIELKPGIDLLGPVE

SEQ ID NO: 524 - protein, 15 aa, Phleum Pratense
SYDATTHFETTVKDV

SEQ ID NO: 525 - protein, 20 aa, Phleum Pratense
YSKITGKELDLSVDLNAASA

SEQ ID NO: 526 - protein, 134 aa, Phleum Pratense
GVVATTDAVEACTGVNVAVMVGGFPRKEGMERKDVMSKNVSIYKSQASALEAHAAPNCKVLVVANPANTNALILKEFAPSIPEKNISCLTRLDHNRALGQVSERLNVQVSDVKNVLIWGNHSSSQYPDVNHATV

SEQ ID NO: 527 - protein, 93 aa, Phleum Pratense
GPFIATVQQRGAAIIKARKLSSALSAASSACDHIRDWVLGTPEGTFVSMGVYSDGSYGVPAGLIYSFPVTCSGGEWTIVQGLPIDEFSRKKMD

SEQ ID NO: 528 - protein, 16 aa, Phleum Pratense
TAQELSEEKALAYSCL

SEQ ID NO: 529 - protein, 226 aa, Phleum Pratense
PSPAVFVDKSTRVICQGITGKNGTFHTEQAIEYGTNMVGGVTPKKGGTEHLGLPVFNSVAEAKAETKANASVIYVPPPFAAAAIMEALEAELDLVVCITEGIPQHDMVKVKAALNRQSKTRLIGPNCPGIIKPGECKIGIMPGYIHKPGRIGIVSRSGTLTYEAVFQTTAVGLGQSTCVGMGGDPFNGTNFVDCLEKFVADPQTEGIVLIGEIGGTAEEDAAAFIQ

SEQ ID NO: 530 - protein, 58 aa, Phleum Pratense
KPVVAFIAGLTAPPGRRMGHAGAIVSGGKGTAQDKIKALREAGVTVVESPAKIGSTMF

SEQ ID NO: 531 - protein, 181 aa, Phleum Pratense
MALPNQGTVDYPSFKLVIVGDGGTGKTTFVKRHLTGEFEKKYEPTIGVEVHPLDFTTNCGKIRFYCWDTAGQEKFGGLRDGYYIHGQCAIIMFDVTSRLTYKNVPTWHRDLCRVCENIPIVLCGNKVDVKNRQVKAKQVTFHRKKNLQYYEISAKSNYNFEKPFLYLARKLAGDANIHFVE

SEQ ID NO: 532 - protein, 15 aa, Phleum Pratense
ITDDTRIRASIPTIK

SEQ ID NO: 533 - protein, 40 aa, Phleum Pratense
GAKVILASHLGRPKGVTPKFSLKPLVPRLSELLGVEVVMA

SEQ ID NO: 534 - protein, 145 aa, Phleum Pratense
AALPEGGVLLLENVRFYKEEEKNDPEFAKKLASVADLYVNDAFGTAHRAHASTEGVTKFLRPSVAGFLMQKELDYLVGAVANPKKPFAAIVGGSKVSSKIGVIESLLAKVDILILGGGMIFTFYKAQGKAVGKSLVEEDKLELAT

SEQ ID NO: 535 - protein, 21 aa, Phleum Pratense
AKAKGVSLLLPTDVVVADKFA

SEQ ID NO: 536 - protein, 47 aa, Phleum Pratense
AIPDGWMGLDVGPDSIKTFSEALDTTKTVIWNGPMGVFEFEKFAAGT

SEQ ID NO: 537 - protein, 59 aa, Phleum Pratense
LADLTGKGVTTIIGGGDSVAAVEKAGLADKMSHISTGGGASLELLEGKPLPGVLALDEA

SEQ ID NO: 538 - protein, 39 aa, Phleum Pratense
GVFTDKDKAAAHMKGGAKKVVISAPSKDAPMFVVGVNED

SEQ ID NO: 539 - protein, 114 aa, Phleum Pratense
DVNIVSNASCTTNCLAPLAKIINDNFGIVEGLMTTVHSITATQKTVDGPSSKDWRGGRAASFNIIPSSTGAAKAVGKVLPELNGKLTGMSFRVPTVDVSVVDLTVRIEKAASYE

SEQ ID NO: 540 - protein, 39 aa, Phleum Pratense
VSTDFIGDSRSSIFDAKAGIALNDNFVKLVSWYDNEWGY

SEQ ID NO: 541 - protein, 23 aa, Phleum Pratense
PIKIGINGFGRIGRLVARVALQC

SEQ ID NO: 542 - protein, 29 aa, Phleum Pratense
ELVAVNDPFITTDYMTYMFKYDTVHGQWK

SEQ ID NO: 543 - protein, 53 aa, Phleum Pratense
AAGADYVVESTGVFTDKDKAAAHIKGGAKKVIISAPSKDAPMFVCGVNEKEYT

SEQ ID NO: 544 - protein, 134 aa, Phleum Pratense
ITIVSNASCTTNCLAPLAKVINDRFGIVEGLMTTVHAMTATQKTVDGPSSKDWRGGRAASFNIIPSSTGAAKAVGKVLPVLNGKLTGMAFRVPTVDVSVVDLTVRLEKAATYEQIKAAIKEESEGNLKGILGYV

SEQ ID NO: 545 - protein, 47 aa, Phleum Pratense
VSTDFQGDSRSSIFDAKAGIALNDNFVKLVSWYDNEWGYSTRVVDLI

SEQ ID NO: 546 - protein, 76 aa, Phleum Pratense
GKYKDELIKNAAYIGTPGKGILAADESTGTIGKRFASINVENVEDNRRALRELLFTTPGALQHISGVILFEETLYQ

SEQ ID NO: 547 - protein, 23 aa, Phleum Pratense
LKENNVLPGIKVDKGTVELAGTD

SEQ ID NO: 548 - protein, 32 aa, Phleum Pratense
KRCAKYYEAGARFAKWRAVLKIGPNEPSQLSI

SEQ ID NO: 549 - protein, 35 aa, Phleum Pratense
QNAQGLARYAIICQENGLVPIVEPEILVDGPHDIE

SEQ ID NO: 550 - protein, 47 aa, Phleum Pratense
CAYVTEVVLAACYKALNDQHVLLEGSLLKPNMVTPGSDAKKVAPEVI

SEQ ID NO: 551 - protein, 28 aa, Phleum Pratense
PPAVPAIVFLSGGQSEEEATVNLNAMNK

SEQ ID NO: 552 - protein, 24 aa, Phleum Pratense
LSFSFGRALQQSTLKAWSGKEENV

SEQ ID NO: 553 - protein, 15 aa, Phleum Pratense
GEGASESLHVKDYKY

SEQ ID NO: 554 - protein, 53 aa, Phleum Pratense
FKYVILGGGVAAGYAAREFAKQGVQPGELAIISKESVAPYERPALSKGYLFPQ

SEQ ID NO: 555 - protein, 51 aa, Phleum Pratense
AARLPGFHTCVGSGGEKLLPEWYTEKGIELILSTEIVKADLASKTLTSAAG

SEQ ID NO: 556 - protein, 25 aa, Phleum Pratense
QAKKDGKAVVVGGGYIGLELSAALK

SEQ ID NO: 557 - protein, 31 aa, Phleum Pratense
NNFDVTMVYPEPWCMPRLFTAGIAHFYEGYY

SEQ ID NO: 558 - protein, 16 aa, Phleum Pratense
VGVGGRPLTGLFKGQV

SEQ ID NO: 559 - protein, 25 aa, Phleum Pratense
PRRVEHVDHARKSAEQAVKAIKAKE

SEQ ID NO: 560 - protein, 26 aa, Phleum Pratense
AEYDYLPYFYSRSFDIAWQFYGDNVG

SEQ ID NO: 561 - protein, 16 aa, Phleum Pratense
YWVKDGKVVGVFLEGG

SEQ ID NO: 562 - protein, 19 aa, Phleum Pratense
SGHSLLRDPRHNKGLAFSE

SEQ ID NO: 563 - protein, 45 aa, Phleum Pratense
YIAMMDLQERNERLFYKLLIDNVEELLPVVYTPVVGEACQKYGSI

SEQ ID NO: 564 - protein, 65 aa, Phleum Pratense
NWPERSIQVIVVTDGERILGLGDLGCQGMGIPVGKLSLYTALGGVRPSACLPITIDVGTNNQTLL

SEQ ID NO: 565 - protein, 23 aa, Phleum Pratense
NYGEKVLVQFEDFANHNAFDLLA

SEQ ID NO: 566 - protein, 25 aa, Phleum Pratense
KSHLVFNDDIQGTASVVLAGLLAAL

SEQ ID NO: 567 - protein, 26 aa, Phleum Pratense
DQTYLFLGAGEAGTGIAELIALEMSK

SEQ ID NO: 568 - protein, 16 aa, Phleum Pratense
ESLQHFKKPFAHEHEP

SEQ ID NO: 569 - protein, 16 aa, Phleum Pratense
VLIGTSGVGKTFTQEV

SEQ ID NO: 570 - protein, 18 aa, Phleum Pratense
LSNPTSHSECTAEEAYTW

SEQ ID NO: 571 - protein, 15 aa, Phleum Pratense
AVFASGSPFDPVEYE

SEQ ID NO: 572 - protein, 17 aa, Phleum Pratense
VPGQSNNAYVFPGFGLG

SEQ ID NO: 573 - protein, 18 aa, Phleum Pratense
GAIRVHDDMLLAASEALA

SEQ ID NO: 574 - protein, 16 aa, Phleum Pratense
LPRPDDLVKYAESCMY

SEQ ID NO: 575 - protein, 123 aa, Phleum Pratense
AAVAWEAGKPLSIEEVEVAPPQAMEVRVKILFTALCHTDVYFWEAKGQTPVFPRIFGHEAGGIVESVGEGVTDVAPGDHVLPVFTGECKECRHCKSAESNMCDLLRINTDRGVMISDGKSRFS

SEQ ID NO: 576 - protein, 56 aa, Phleum Pratense
GKPIFHFVGTSTFSEYTVMHVGCVAKINPEAPLDKVCVLSCGISTGLGASINVAKP

SEQ ID NO: 577 - protein, 35 aa, Phleum Pratense
GSTVAIFGLGAVGLAAAEGARIAGASRIIGIDLNA

SEQ ID NO: 578 - protein, 16 aa, Phleum Pratense
TEFVNPKDHTKPVQEV

SEQ ID NO: 579 - protein, 45 aa, Phleum Pratense
AEMTDGGVDRSVECTGNINAMIQAFECVHDGWGVAVLVGVPHKDA

SEQ ID NO: 580 - protein, 27 aa, Phleum Pratense
FKTHPMNFLNERTLKGTFFGNFKPRTD

SEQ ID NO: 581 - protein, 18 aa, Phleum Pratense
EKFITHSVTFSEINKAFD

SEQ ID NO: 582 - protein, 71 aa, Phleum Pratense
CLAKINPEAPLDKVCVLSCGISTGLGAMLNVAKPKKGSTVAIFGLGAVGLAAMEGARMAGASRIIGVDLNP

SEQ ID NO: 583 - protein, 43 aa, Phleum Pratense
EMTNGGVDRAVECTGHIDAMIAAFECVHDGWGVAVLVGVPHKE

SEQ ID NO: 584 - protein, 30 aa, Phleum Pratense
VFKTHPMNFLNERTLKGTFFGNYKPRTDLP

SEQ ID NO: 585 - protein, 18 aa, Phleum Pratense
PSEDAVEVVVSPPFVFLQ

SEQ ID NO: 586 - protein, 50 aa, Phleum Pratense
AVAAQNCWVRKGGAFTGEISAEMLVNLQVPWVILGHSERRALLSESNDFV

SEQ ID NO: 587 - protein, 75 aa, Phleum Pratense
DKVAYALAQGLKVIACIGETLEQREAGTTMEVVAAQTKAIAEKISDWTNVVLAYEPVWAIGTGKVASRAQAQEVH

SEQ ID NO: 588 - protein, 42 aa, Phleum Pratense
TRIIYGGSVNGANCKELAAQPDLDGFLVGGASLKPEFVDIIK

SEQ ID NO: 589 - protein, 61 aa, Phleum Pratense
AEMLANLGIPWVILGHSERRALLGESSEFVGDKVAYALAQGLKVIACVGETLEQREAGSTM

SEQ ID NO: 590 - protein, 33 aa, Phleum Pratense
WTNVVIAYEPVWAIGTGKVATPAQAQEVHANLR

SEQ ID NO: 591 - protein, 18 aa, Phleum Pratense
SPEVAETTRIIYGGSVTG

SEQ ID NO: 592 - protein, 30 aa, Phleum Pratense
NELAAQPDVDGFLVGGASLKPEFIDIINAA

SEQ ID NO: 593 - protein, 15 aa, Phleum Pratense
VTGYFAWSLLDNFEW

SEQ ID NO: 594 - protein, 28 aa, Phleum Pratense
VQWSKWHVFWVDERVVPKDHVDSNYKLA

SEQ ID NO: 595 - protein, 32 aa, Phleum Pratense
ATGFPRFDLMLLGMGPDGHLASLFPGHPLLNE

SEQ ID NO: 596 - protein, 24 aa, Phleum Pratense
DSPKPPPQRITFTFPVIKSSAYVA

SEQ ID NO: 597 - protein, 16 aa, Phleum Pratense
DGHLASLFPGHPLLNE

SEQ ID NO: 598 - protein, 24 aa, Phleum Pratense
DSPKPPPQRITFTFPVIKSSAYVA

SEQ ID NO: 599 - protein, 43 aa, Phleum Pratense
YNLLDTVSRHTIQVYPRSWTAVMLTFDNAGMWNLRSNLWERYY

SEQ ID NO: 600 - protein, 34 aa, Phleum Pratense
SCTSPARSLRDEYNMPENGLRCGKIVGLPLPPSY

SEQ ID NO: 601 - protein, 100 aa, Phleum Pratense
MGPGKWKPELRKTYNLLDAVSRHSIQVYPRSWSAVMLTFDNAGMWNVRSNVWERHYLGEQLYISVISPARSLRDEYNFPENALRCGKVVGLPLPPSYLPA

SEQ ID NO: 602 - protein, 21 aa, Phleum Pratense
SVYMAKLAEQAERYEEMVEFM

SEQ ID NO: 603 - protein, 37 aa, Phleum Pratense
ELSVEERNLLSVAYKNVIGARRASWRIISSIEQKEEG

SEQ ID NO: 604 - protein, 38 aa, Phleum Pratense
AGAAESKVFYLKMKGDYHRYLAEFKSGAERKEAAESTM

SEQ ID NO: 605 - protein, 82 aa, Phleum Pratense
AQDIALADLAPTHPIRLGLALNFSVFYYEILNSPDRACNLAKQAFDEAISELDSLGEESYKDSTLIMQLLRDNLTLWTSDTN

SEQ ID NO: 606 - protein, 16 aa, Phleum Pratense
AEDPYVFFEWHVTYGT

SEQ ID NO: 607 - protein, 25 aa, Phleum Pratense
FPGPRINCSSNNNIVVNVFNQLDQP

SEQ ID NO: 608 - protein, 17 aa, Phleum Pratense
LFTWNGIQHRKNSWQDG

SEQ ID NO: 609 - protein, 22 aa, Phleum Pratense
CNVGIKSSLNFRIQGHDMRLVE

SEQ ID NO: 610 - protein, 44 aa, Phleum Pratense
GWAWSLNQWRSFRWNLTASAARPNPQGSYHYGQINITRTIKLMI

SEQ ID NO: 611 - protein, 18 aa, Phleum Pratense
NGVSHVDADTPLKLAEYF

SEQ ID NO: 612 - protein, 27 aa, Phleum Pratense
PELRKTYNLLDAVSRHSIQVYPRSWSA

SEQ ID NO: 613 - protein, 22 aa, Phleum Pratense
QLYISVISPARSLRDEYNFPEN

SEQ ID NO: 614 - protein, 15 aa, Phleum Pratense
QVAIGTDDVYKSAEA

SEQ ID NO: 615 - protein, 36 aa, Phleum Pratense
ELGGKILRQPGPLPGLNTKIASFLDPDGWKVVLVDH

SEQ ID NO: 616 - protein, 41 aa, Phleum Pratense
DRRRLLHVVYRVGDLDKTIKFYTECLGMKLLRKRDIPEERY

SEQ ID NO: 617 - protein, 23 aa, Phleum Pratense
GPEDSHFVVELTYNYGVESYDIG

SEQ ID NO: 618 - protein, 24 aa, Phleum Pratense
IKAKGGTVTREPGPVKGGKSVIAF

SEQ ID NO: 619 - protein, 99 aa, Phleum Pratense
FELIERGPTPEPLCQVMLRVGDLDRAIKFYEKAFGMELLRRKDNPQYKYTIAMMGYGPEDKNAVLELTYNYGVKEYDKGNAYAQIAIGTDDVYKTAEVV

SEQ ID NO: 620 - protein, 43 aa, Phleum Pratense
NGGQITREPGPLPGISTKITACTDPDGWKSVFVDNLDFLKELE

SEQ ID NO: 621 - protein, 27 aa, Phleum Pratense
NPTTAAGVLRVFFHDCFVSGCDASVLI

SEQ ID NO: 622 - protein, 23 aa, Phleum Pratense
SEKDADINHSLPGDAFDAVVRSK

SEQ ID NO: 623 - protein, 17 aa, Phleum Pratense
ALELECPGVVSCADILA

SEQ ID NO: 624 - protein, 25 aa, Phleum Pratense
KGFTVQEMVALSGAHTLGFSHCQEF

SEQ ID NO: 625 - protein, 19 aa, Phleum Pratense
AAFNDIMTPGKFDNMYYVN

SEQ ID NO: 626 - protein, 51 aa, Phleum Pratense
SQDEAGTSAIKTVELDTMLGGRAVQHREPQGYESDKFLSYFKPCIIPLEGG

SEQ ID NO: 627 - protein, 87 aa, Phleum Pratense
VPFARSSLNHDDVFILDTEKKIYQFNGANSNIQERAKALEVIQHLKDKYHEGVCDVAIVDDGKLQAESDSGEFWVVFGGFAPIGKKT

SEQ ID NO: 628 - protein, 17 aa, Phleum Pratense
DCGSELFVWVGRVTQVD

SEQ ID NO: 629 - protein, 15 aa, Phleum Pratense
GDCYIVLYTYHSGEK

SEQ ID NO: 630 - protein, 31 aa, Phleum Pratense
KGRPVLGRIYQGKEPPQFIALFQPMVILKGG

SEQ ID NO: 631 - protein, 17 aa, Phleum Pratense
YEQQQWAAKVAEFLKPG

SEQ ID NO: 632 - protein, 15 aa, Phleum Pratense
EDVMILDTHAEVFVW

SEQ ID NO: 633 - protein, 25 aa, Phleum Pratense
SGLNVLIETYFADVPAESYKTLTSL

SEQ ID NO: 634 - protein, 27 aa, Phleum Pratense
IPSGKYLFAGVVDGRNIWADDLAASLS

SEQ ID NO: 635 - protein, 43 aa, Phleum Pratense
CSLMHTAVDLVNETKLDSEIKSWLAFAAQKVVEVNALGKALVG

SEQ ID NO: 636 - protein, 65 aa, Phleum Pratense
ANAAAQASRRSSPRVNNEEVQKAAAALKGSDHRRATTVSARLDAQQKKLNLPVLPTTTIGSFPQT

SEQ ID NO: 637 - protein, 15 aa, Phleum Pratense
KISEEAYVSAIKEEI

SEQ ID NO: 638 - protein, 71 aa, Phleum Pratense
KVVKIQEELDIDVLVHGEPERNDMVEYFGEQLSGFAFTANGWVQSYGSRCVKPPIIYGDVSRPNPMTVFWS

SEQ ID NO: 639 - protein, 15 aa, Phleum Pratense
KISEEAYVSAIKEEI

SEQ ID NO: 640 - protein, 71 aa, Phleum Pratense; identical to SEQ ID NO: 638

SEQ ID NO: 641 - protein, 37 aa, Phleum Pratense
QEVAGDVRMTDTRADEAERGITIKSTGISLYYEMSEE

SEQ ID NO: 642 - protein, 166 aa, Phleum Pratense
RDGNDYLINLIDSPGHVDFSSEVTAALRITDGALVVVDCIEGVCVQTETVLRQALGERIRPVLTVNKMDRCFLELQVDGEEAYQTFSRVIENANVIMATYEDALLGDVQVYPEKGTVAFSAGLHGWAFTLTNFAKMYASKFGVDESKMMERLWGENFFDPATKKWT

SEQ ID NO: 643 - protein, 30 aa, Phleum Pratense
KNTGSGTCKRGFVQFCYEPIKQIIEICMND

SEQ ID NO: 644 - protein, 16 aa, Phleum Pratense
KDKLWPMLKKLGVTMK

SEQ ID NO: 645 - protein, 22 aa, Phleum Pratense
DEKDLMGKALMKRVMQAWLPAS

SEQ ID NO: 646 - protein, 65 aa, Phleum Pratense
HLPSPSKAQRYRVENLYEGPLDDVYANAIRNCDPEGPLMLYVSKMIPASDKGRFFAFGRVFAGRV

SEQ ID NO: 647 - protein, 401 aa, Phleum Pratense
TGMKVRIMGPNFVPGQKKDLYTKSVQRTVIWMGKKQESVEDVPCGNTVALVGLDQFITKNATLTGEKEVDACPIRAMKFSVSPVVRVAVQCKVASDLPKLVEGLKRLAKSDPMVLCSIEESGEHIIAGAGELHLEICLKDLQDDFMGGAEIIVSPPVVSFRETVLDKSCRTVMSKSPNKHNRLYMEARPLEEGLPEAIDEGRIGPRDDPKVRSKILSEEFGWDKDLAKKIWCFGPETTGPNMVVDMCKGVQYLNEIKDSVVAGFQWASKEGALADENMRGICFEVCDVVLHTDAIHRGGGQVIPTARRVIFASQLTAKPRLLEPVYLVEIQAPEGALGGIYGVLNQKRGHVFEEMQRPGTPLYNIKAYLPVIESFGFSATLRAATSGQAFPQCVFDHWDVM

SEQ ID NO: 648 - protein, 25 aa, Phleum Pratense
LVKEIRKRKGLKEQMTPLSDFEDKL

SEQ ID NO: 649 - protein, 27 aa, Phleum Pratense
REESVYMAKLAEQAERYEEMVEFMERV

SEQ ID NO: 650 - protein, 42 aa, Phleum Pratense
EELSVEERNLLSVAYKNVIGARRASWRIISSIEQKEEGRGND

SEQ ID NO: 651 - protein, 35 aa, Phleum Pratense
AESKVFYLKMKGDYHRYLAEFKSGAERKEAAESTM

SEQ ID NO: 652 - protein, 85 aa, Phleum Pratense
YKAAQDIALADLAPTHPIRLGLALNFSVFYYEILNSPDRACNLAKQAFDEAISELDSLGEESYKDSTLIMQLLRDNLTLWTSDTN

SEQ ID NO: 653 - protein, 28 aa, Phleum Pratense
REENVYMAKLAEQAERYEEMVEFMEKVA

SEQ ID NO: 654 - protein, 45 aa, Phleum Pratense
GELTVEERNLLSVAYKNVIGARRASWRIISSIEQKEESRGNEAYV

SEQ ID NO: 655 - protein, 20 aa, Phleum Pratense
IETELSKICDGILKLLDSHL

SEQ ID NO: 656 - protein, 21 aa, Phleum Pratense
AESKVFYLKMKGDYHRYLAEF

SEQ ID NO: 657 - protein, 33 aa, Phleum Pratense
DYHRYLAEFKAGAERKEAAENTLVAYKSAQDIA

SEQ ID NO: 658 - protein, 75 aa, Phleum Pratense
LPTTHPIRLGLALNFSVFYYEILNSPDRACNLAKQAFDEAIAELDSLGEESYKDSTLIMQLLRDNLTLWTSDNAD

SEQ ID NO: 659 - protein, 29 aa, Phleum Pratense
VYYSMYGHVGKLAEEIKKGASSVEGVEVK

SEQ ID NO: 660 - protein, 26 aa, Phleum Pratense
ELAEADGILFGFPTRFGMMASQMKAF

SEQ ID NO: 661 - protein, 18 aa, Phleum Pratense
DATGGLWREQSLAGKPAG

SEQ ID NO: 662 - protein, 38 aa, Phleum Pratense
FFSTGTQGGGQETTPLTAVTQLTHHGMVFVPVGYTFGA

SEQ ID NO: 663 - protein, 28 aa, Phleum Pratense
MFDMEKVQGGSPYGAGTFAGDGSRWPSE

SEQ ID NO: 664 - protein, 166 aa, Phleum Pratense
VFFDVTIGGAPAGRIVMELYADVVPKTAENFRALCTGEKGVGKMGKPLHYKGSSFHRVIPGFMCQGGDFTAGNGTGGESIYGAKFADENFVKKHTGPGVLSMANAGPGTNGSQFFLCTAKTAWLDGKHVVFGQVVEGMDVVKAVEKVGSQSGRCSKPVVIADCGQL

SEQ ID NO: 665 - protein, 313 aa, Ambrosia Artemisiifolia
LMATIKAVKARQIFDSRGNPTVEVDITLSDGTLARAAVPSGASTGIYEALELRDGGSDYLGKGVSKAVANVNTIIGPALVGKDPTDQTGIDNFMVQQLDGTQNEWGWCKQKLGANAILAVSLAVCKAGASVLKTPLYKHIANLAGNKNLVLPVPAFNVINGGSHAGNKLAMQEFMILPIGASSFKEAMKMGVEVYHNLKSVIKKKYGQDATNVGDEGGFAPNIQENKEGLELLKTAIAKAGYTDKVVIGMDVAASEFYGEKDKTYDLNFKEENNDGKEKISGEQLKDLYKSFVSEYPIVSIEDPFDQDDWEHY

SEQ ID NO: 666 - protein, 437 aa, Ambrosia Psilostachya
ARQIFDSRGNPTVEVDITLSDGTLARAAVPSGASTGIYEALELRDGGSDYLGKGVSKAVANVNTIIGPALVGKDPTDQTGIDNFMVQQLDGTQNEWGWCKQKLGANAILAVSLAVCKAGASVLKTPLYKHIANLAGNKNLVLPVPAFNVINGGSHAGNKLAMQEFMILPIGASSFKEAMKMGVEVYHNLKSVIKKKYGQDATNVGDEGGFAPNIQENKEGLELLKTAIAKAGYTDKVVIGMDVAASEFYGEKDKTYDLNFKEENNDGKEKISGEQLKDLYKSFVSEYPIVSIEDPFDQDDWEHYAKMTAECGEQVQIVGDDLLVTNPTRVKKAIDEKTCNALLLKVNQIGSVTESIEAVRMSKHAGWGVMASHRSGETEDTFIADLSVGLATGQIKTGAPCRSERLAKYNQLLRIEEELGSEAVYAGANFRKPVEPY

SEQ ID NO: 667 - protein, 443 aa, Betula Verrucosa
AEITHVKARQIFDSRGNPTVEAEVTTANGVVSRAAVPSGASTGVYEALELRDGGSDYLGKGVLKAVENVNAIIGPALIGKDATEQAAIDNFIVQQLDGTVNEWGWCKQKLGANAILAVSLAVCKAGASAKKIPLYKHIANLAGNPKLVLPVPAFNVINGGSHAGNKLAMQEFMILPVGASSFKEAMKMGVEVYHHLKAVIKKKYGQDATNVGDEGGFAPNIQENKEGLELLKTAIAKAGYTGKVVIGMDVAASEFYGEDKRYDLNFKEENNDGSQKIPGDALKDLYKSFVAEYPIVSIEDPFDQDDWEHYSKVTAEIGEKVQIVGDDLLVTNPKRVEKAIKEKSCNALLLKVNQIGSVTESIEAVKMSKRAGWGVMASHRSGETEDTFIADLSVGLATGQIKTGAPCRSERLAKYNQLLRIEEELGSEAVYAGANFRTPVEPY

SEQ ID NO: 668 - protein, 446 aa, Cynodon Dactylon
MAATIQSVKARQIFDSRGNPTVEVDVCCSDGTFARAAVPSGASTGVYEALELRDGGSDYLGKGVSKAVNNVNSIIGPALIGKDPTAQTEIDNFMVQQLDGTKNEWGWCKQKLGANAILAVSLAVCKAGASIKKIPLYQHIANLAGNKQLVLPVPAFNVINGGSHAGNKLAMQEFMILPTGASSFKEAMKMGVEVYHNLKSVIKKKYGQDATNVGDEGGFAPNIQENKEGLELLKTAIEKAGYTGKVVIGMDVAASEFYNDKDKTYDLNFKEENNDGSQKISGDSLKNVYKSFVSEYPIVSIEDPFDQDDWVHYAKMTEEIGEQVQIVGDDLLVTNPTRVSKAIKEKSCNALLLKVNQIGSVTESIEAVKMSKHAGWGVMTSHRSGETEDTFIADLAVGLATGQIKTGAPCRSERLAKYNQLLRIEEELGAAAVYAGAKFRAPVEPY

SEQ ID NO: 669 - protein, 445 aa, Quercus Alba
MAITIQAIKARQIFDSRGNPTVEVDVTTSDGAFYRAAVPSGASTGIYEALELRDGGSDYLGKGVSKAVENVNAIIAPALIGKDPTDQVAIDNFMVQQLDGTVNEWGWCKQKLGANAILAVSLAVCKAGAGVNKIPLYKHIANLAGNKKLVLPVPAFNVINGGSHAGNKLAMQEFMILPVGASSFKEAMKMGVEVYHNLKSVIKKKYGQDATNVGDEGGFAPNIQENKEGLELLKTAIAKAGYTSQVVIGMDVAASEFYGEDKRYDLNFKEEKNDGSQKIPGDALKDLYKSFVSEYPIVSIEDPFDQDDWEHYGKMTSEVGEKVQIVGDDLLVTNPKRVEKAIKEKTCNALLLKVNQIGSVTESIEAVKMSKRAGWGVMASHRSGETEDTFIADLSVGLATGQIKTGAPCRSERLAKYNQLLRIEEELGSEAVYAGASFRRPVEPY

SEQ ID NO: 670 - protein, 452 aa, Ambrosia Artemisiifolia
AALISDTAPWKDLKAHVGEIDKTHLRDLMSDTERCSSMMLEFDGIFLDYSRQRATVDTVSKLFTLAEEAHLKQKINSMFNGEHINSTENRSVLHVALRAAKDTTINSDGKNVVPDVWQVLDKIKEFSDKVRNGSWVGATGKALTNVIAIGIGGSFLGPLFVHTALQTDPEASKLAGGRQLRFLANVDPVDVARNISGLDPETTLVVVVSKTFTTAETMLNARTLREWISSALGPQAVSKHMVAVSTNLKLVEKFGIDPNNAFAFWDWVGGRYSVCSAVGVLPLSLQYGFSVVEKFLKGARSIDQHFHSAPFESNIPVLLGLLSVWNVSFLGYPARAILPYTQALEKLAPHIQQVSMESNGKGVSIDGVRLPFEAGEIDFGEPGTNGQHSFYQLIHQGRVIPCDFIGIVKSQQPVYLKGSVLLVTDSGWKNQLLILDGRISLQLQGLVIPQPL

SEQ ID NO: 671 - protein, 389 aa, Ambrosia Psilostachya
GRQLRFLANVDPVDVARNISGLDPETTLVVVVSKTFTTAETMLNARTLREWISSALGPQAVSKHMVAVSTNLKLVEKFGIDPNNAFAFWDWVGGRYSVCSAVGVLPLSLQYGFSVIEKFLEGARSIDQHFHSAPFENNIPVLLGLLSVWNVSFLGYPARAILPYTQALEKLAPHIQQVSMESNGKGVSIDGVRLPFEAGEIDFGEPGTNGQHSFYQLIHQGRVIPCDFIGIVKSQQPVYLKDEVVNNHDELMSNFFAQPDALAYGKTPEQLQSENVASHLVPHKTFTGNRPSLSLLLPSLDAYRIGQLLAIYEHRIAVEGFIWGINSFDQWGVELGKSLASQVRKQLHASRKKGESVEGFNFSTTKLLTRYLEASADVPSEPTTLLPKI

SEQ ID NO: 672 - protein, 633 aa, Anthoxanthum Odoratum
TKSGDGDQTISGPQKRSSRAVRAPSSFLPVCLLRPLPPRDGRPPSSGSLPPKLPRGAGPGTKSSAPMASPALISDTDQWKALQAHVGAIHKTHLRDLMADADRCKALTAEFEGVFLDYSRQQATTETVDKLFKLAEAAKLKEKIAKMFNGDKINSTENRSVLHVALRAPRDAVINSDGVNVVPEVWAVIDKIKQFSETFRSGSWVGATGKPLTNVVSVGIGGSFLGPLFVHTALQTDPVAAESAKGRQLRFLANVDPVDVARSIKDLDPETTLVVVVSKTFTTAETMLNARTIKEWIVSSLGPQAVSKHMIAVSTNLKLVKEFGIDPNNAFAFWDWVGGRYSVCSAVGVLPLSLQYGFPVVQKFLEGASSIDNHFRTSSFEKNIPVLLGLLSVWNVSFLGYPARAILPYSQALEKLAPHIQQLSMESNGKGVSIDGVRLPYEAGEIDFGEPGTNGQHSFYQLIHQGRVIPCDFIGVIKSQQPVYLKGETVSNHDELMSNFFAQPDALAYGKTPEQLRSENVSENLIPHKTFQGNRPSLSFLLSSLSAYEIGQLLAIYEHRIAVQGFIWGINSFDQWGVELGKSLASQVRKQLHASRMEGKPIEGFNPSSASLLARYLSVEPSTPFDTTVLPKV

SEQ ID NO: 673 - protein, 568 aa, Betula Verrucosa
MASRTLISDTEAWKNLKAHVEEIKKTHLRDLMSDAERCKSMMVESEGVLLDHSRQRATPETMDKLFKLAEAAHLKEKINRMYSGVHINSTENRPVLHVALRASRDGVIQSDGKNVVPEVWKVLDKIQEFSERVRNGSWVGATGKALKDVVAVGIGGSFLGPLFVHTALQTDPEAIESARGRQLRFLANVDPIDVARNITGLNPETTLVVVVSKTFTTAETMLNARTLREWISAALGPSAVAKHMVAVSTNLTLVEKFGIDPNNAFAFWDWVGGRYSVCSAVGVLPLSLQYGFSVVEKFLKGASSIDQHFYSAPYEKNIPVLLGLLSIWNVSFLGYPARAILPYSQALEKFAPHIQQVSMESNGKGVSIDGVLLPFEAGEIDFGEPGTNGQHSFYQLIHQGRVIPCDFIGIVRSQQPVYLKGEVVSNHDELMSNFFAQPDALAYGKTPEQLHKENVSPHLIPHKTFSGNRPSLSLLLPSLNAYNIGQLLAIYEHRIAVEGFVWGINSFDQWGVELGKSLATQVRKQLNASRTKGEPVEGFNFSTTTLLTRYLEATADIPSDPPTLLPRI

SEQ ID NO: 674 - protein, 571 aa, Betula Verrucosa
SFQMASRTLISDTEAWKNLKAHVEEIKKTHLRDLMSDAERCKSMMVESEGVLLDHSRQRATPETMDKLFKLAEAAHLKEKINRMYSGVHINSTENRPVLHVALRASRDGVIQSDGKNVVPEVWKVLDKIQEFSERVRNGSWVGATGKALKDVVAVGIGGSFLGPLFVHTALQTDPEAIESARGRQLRFLANVDPIDVARNITGLNPETTLVVVVSKTFTTAETMLNARTLREWISAALGPSAVAKHMVAVSTNLTLVEKFGIDPNNAFAFWDWVGGRYSVCSAVGVLPLSLQYGFSVVEKFLKGASSIDQHFYSAPYEKNIPVLLGLLSIWNVSFLGYPARAILPYSQALEKFAPHIQQVSMESNGKGVSIDGVLLPFEAGEIDFGEPGTNGQHSFYQLIHQGRVIPCDFIGIVRSQQPVYLKGEVVSNHDELMSNFFAQPDALAYGKTPEQLHKENVSPHLIPHKTFSGNRPSLSLLLPSLNAYNIGQLLAIYEHRIAVEGFVWGINSFDQWGVELGKSLATQVRKQLNASRTKGEPVEGFNFSTTTLLTRYLEATADIPSDPPTLLPRI

SEQ ID NO: 675 - protein, 656 aa, Cynodon Dactylon
AGVRTHFYRAAVRSAYAGRGCPHRPHQPNIQFKGRGVYVYHHHHYRRLPTGTRRKEAIQNPRKLAGGEEQIRFLFQRSTLHPRRPADEAMASPALICDTEQWKALQAHVSAIQKTHLRDLMADADRCKAMTAEFEGIFLDYSRQQATGETMEKLLKLAEAAKLKEKIEKMFKGDKINSTENRSVLHVALRAPRDAVINSDGVNVVPEVWGVKDKIKQFSETFRSGSWVGATGKALTNVVSVGIGGSFLGPLFVHTALQTDPEAAECAKGRQLRFLANVDPVDVARSIKDLDPETTLVVVVSKTFTTAETMLNARTLKEWIVSSLGPQAVSKHMIAVSTNLKLVKEFGIDPNNAFAFWDWVGGRYSVCSAVGVLPLSLQYGFPIVQKFLEGASSIDNHFYSCSFEKNIPVLLGLLSVWNVSFLGYPARAILPYAQALEKFAPHIQQLSMESNGKGVSIDGVKLSFETGEIDFGEPGTNGQHSFYQLIHQGRVIPCDFIGVVQSQRPVYLKGETVSNHDELMSNFFAQPDALAYGKTPEQLHSEKVPENLIPHKTFQGNRPSLSLLLPTLSAYEIGQLLAIYEHRIAVQGFVWGINSFDQWGVELGKSLASQVRKQLHGSRMEGKPVEGFNPSTSSLLARYLAVKPSTPYDSTVLPKV

SEQ ID NO: 676 - protein, 567 aa, Cynodon Dactylon
MASPALICDTEQWKALQAHVSAIQKTHLRDLMADADRCKAMTAEFEGIFLDYSRQQATGETMEKLLKLAEAAKLKEKIEKMFKGDKINSTENRSVLHVALRAPRDAVINSDGVNVVPEVWGVKDKIKQFSETFRSGSWVGATGKALTNVVSVGIGGSFLGPLFVHTALQTDPEAAECAKGRQLRFLANVDPVDVARSIKDLDPETTLVVVVSKTFTTAETMLNARTLKEWIVSSLGPQAVSKHMIAVSTNLKLVKEFGIDPNNAFAFWDWVGGRYSVCSAVGVLPLSLQYGFPIVQKFLEGASSIDNHFYSCSFEKNIPVLLGLLSVWNVSFLGYPARAILPYAQALEKFAPHIQQLSMESNGKGVSIDGVKLSFETGEIDFGEPGTNGQHSFYQLIHQGRVIPCDFIGVVQSQRPVYLKGETVSNHDELMSNFFAQPDALAYGKTPEQLHSEKVPENLIPHKTFQGNRPSLSLLLPTLSAYEIGQLLAIYEHRIAVQGFVWGINSFDQWGVELGKSLASQVRKQLHGSRMEGKPVEGFNPSTSSLLARYLAVKPSTPYDSTVLPKV

SEQ ID NO: 677 - protein, 568 aa, Fraxinus Excelsior
MASSSLICETDPWKDLRAHVEDIKKTHLRDLMSDTERCKSMMVEFDGILLDYSRQRTNLDTLNKLHSLAEAAHLKEKIYRMFNGERINITENRSVLHIALRAPRDSVINGDGKNVVPDVWQVLDKIRDFSESVRSGAWVGATGKVLKDVIAVGIGGSFLGPLFVHTALQSDPEASEFAHGRQLRFLANVDPIDVARNIAGLNPETTLVVVVSKTFTTAETMLNARTLREWISAALGPQAVAKHMVAVSTNLTLVEKFGIDPNNAFAFWDWVGGRYSVCSAVGVLPLSLQYGFSVVEKFLKGASSIDQHFYSAPLEKNLPVLLGLLSVWNVSFLGYPARAILPYSQALEKFAPHIQQVSMESNGKGVSIDGVPLPYETGEIDFGEPGTNGQHSFYQLIHQGRVIPCDFIGVVKSQQPVYLKGEMVSNHDELMSNFFAQPDALAYGKTAEQLLKENVPQPLIPHKTFSGNRPSLSLLLPTLNAYNIGQLLAIYEHRIAVEGFLWGINSFDQWGVELGKSLATQVRKQLHASRKKGEPFEGFNFSTTTMLKRYLEESADVPKEDCTILPKI

SEQ ID NO: 678 - protein, 600 aa, Lollium Perenne
LLRRSSPFHRHRSPAARRRHPPLARPTSPRRSAMASPALISDTDQWKALQAHVGAIHKTHLRDLMADADRCKAMTAEFEGIHLDYSRQQATTETVDKLFKLAEAAKLKEKIEKMFSGDKINTTENRSVLHVALRAPRDAVINSDGVNVVPEVWAVIDKIKQFSETFRSGSWVGATGKPLTNVVSVGIGGSFLGPLFVHTALQTDPAAAESAKGRQLRFLANVDPVDVARSIKDLDPATTLVVVVSKTFTTAETMLNARTIKEWIVSSLGPQAVSKHMIAVSTNLKLVKEFGIDPNNAFAFWDWVGGRYSVCSAVGVLPLSLQYGFPIVQKFLEGASSIDNHFRTSSFEKNIPVLLGLLSVWNVSFLGYPARAILPYTQALEKLAPHIQQLSMESNGKGVSIDGVRLPYEAGEIDFGEPGTNGQHSFYQLIHQGRVIPCDFIGVIKSQQPVYLKGETVSNHDELMSNFFAQPDALAYGKTPEQLRSENVSENLIPHKTFQGNRPSLSFLLSSLSAYEIGQLLSIYEHRIAVQGFIWGINSFDQWGVELGKSLASQVRKQLHASRMEGKPVEGFNPSSASLLARYLAVEPSIPYDTTVLPKV

SEQ ID NO: 679 - protein, 568 aa, Olea Europaea
MASSSLIYETGAWKDLKAHVEDIEKIHLRDLMSDTVRCKSMIIDFDGVLLDYSRQRANFDTLNKLHNLAKAAHLKEKINGMFNGERINSTENRSVLHIALRAPRDSVINSDGKNVVPDVWQVLDKIRDFSERVRSGAWVGATGKVLKDVIAIGIGGSFLGPLFVHTALQKDPEAIEFARGRQLRFLANVDPIDVARNIAGLNPETTLVVVVSKTFTTAETMLNARTLREWISAALGPQAVAKHMVAVSTNLTLVEKFGIDPNNAFAFWDWVGGRYSVCSAVGVLPLSLQYGFSVVEKFLKGASSIDQHFYSAPFEKNLPVLLGLLSIWNVSFLGYPARAILPYSQALEKFAPHIQQVSMESNGKGVSIDGVPLPYETGEIDFGEPGTNGQHSFYQLIHQGRVIPCDFIGVVKSQQPVYLKGEMVSNHDELMSNFFAQPDALAYGKTAEQLLKENVPQPLIPHKTFSGNRPSLSLLLPTLNAYNIGQLLAIYEHRIAVEGFLWGINSFDQWGVELGKSLATQVRKQLHASRKKGEPIEGFNFSTTTMLTRYLEESADVPKEDCTILPKI

SEQ ID NO: 680 - protein, 592 aa, Plantago Lanceolata
KTITSKQTANQPSSQSFFNTFRNMASSPLICETEPWKDLKVHVDDIKKTHLRELMTDTGRCQSMMVEFDELLLDYSRQCATLDTMKKLYALAEAAHLKEKISRMFNGERINSTENRSVLHVALRAPRDSVINSDGKNVVPDVWNVLDKIKDFSERVRSGAWVGATGKALTEVVAIGIGGSFLGPLFVHTALQTDPEAAQFATGRQLRFLANVDPIDVARNIAGLNPETTLVVVVSKTFTTAETMLNARTLREWISAALGPEAVSKHMVAVSTNLTLVEKFGIDPKNAFAFWDWVGGRYSVCSAVGVLPLALQYGFEVVEKFLKGASSVDQHFSSAPFEKNLPVLLGLLSVWNVSFLGYPARAILPYSQALEKLAPHIQQVSMESNGKGVSIDGVPLPYEAGEIDFGEPGTNGQHSFYQLIHQGRVIPCDFIGVVKSQQPVYLKGEVVSNHDELMSNFFAQPDALAYGKTPEQLLKESVPNHLVTHKTFSGNRPSLSLLLPSLHAYNVGQLLAIYEHRVAVEGFVWGINSFDQWGVELGKSLASQVRKQLHASRKKGEPVEGFNFSTTTVLSRYLKESEADVPKEECTILPKM

SEQ ID NO: 681 - protein, 633 aa, Poa Pratensis
QIRHGHSPVRSSPIHIPPPPPVSFSASSLLLSPSAPINPLPPPPIRRQPAPRHPRRHILAGPLRGSMASPALISDTDQWKALQAHVGAIHKTHLRDLMADADRCKAMTVEFEGVFLDYARQQATTETVDKLFKLAEAAKLKEKIEKMFSGEKINSTENRSVLHVALRAPRDAVINSDGVNVVPEVWSVKDKIKQFSETFRSGSWVGATGKPLTNVVSVGIGGSFLGPLFVHTALQTDPEAAESAKGRQLRFLANVDPVDVARSIKDLDPETTLVVVVSKTFTTAETMLNARTIKEWIVSSLGPQAVSKHMIAVSTNLKLVKEFGIDPNNAFAFWDWVGGRYSVCSAVGVLPLSLQYGFPIVQKFLEGASSIDNHFRTASFEKNIPVLLGLLSVWNVSFLGYPARAILPYSQALEKLAPHIQQVSMESNGKGVSIDGVPLPYEAGEIDFGEPGTNGQHSFYQLIHQGRVIPCDFIGVIKSQQPVYLKGETVSNHDELMSNFFAQPDALAYGKTPEQLRSENVSENLIPHKTFKGNRPSLSFLLSSLSAYEIGQLLAIYENRIAVQGFIWGINSFDQWGVELGKSLASQVRKQLHASRMEGKPIEGFNPSSASLLARYLAVEPSTPYDTTVLPKV

SEQ ID NO: 682 - protein, 571 aa, Quercus Alba
QFQMASPTLISDTGAWKDLKGHVEEINKTHLRDLMADAERCKSMMVEFDGVLLDYSRQRATNETVDKLFKLAEEAKLKEKINRMYNGEHINSTENRSVLHVALRASRDAVIKSDGKNVVPEVWSVLDKIKDFSERVRSGSWVGATGKVLKDVVAVGIGGSFLGPLFVHTALQTDPEAIKSARGRQLRFLANVDPIDVARNITGLNPETTLVVVVSKTFTTAETMLNARTLREWISAALGPSAVAKHMVAVSTNLTLVEKFGIDPNNAFAFWDWVGGRYSVCSAVGVLPLSLQYGFSVVEQFLKGASSIDQHFYSAPHEKNIPVLLGLLSVWNVSFFGYPARAILPYSQALEKFAPHIQQVSMESNGKGVSIDGVPLPFEAGEIDFGEPGTNGQHSFYQLIHQGRVIPCDFIGVVKSQQPVFLKGEVVSNHDELMSNFFAQPDALAYGKTPEQLHKENVAPHLIPHKTFSGNRPSLSLLLPSLNAYNIGQLLAIYEHRIAVEGFVWGINSFDQWGVELGKSLATQVRKQLHVSRTKGEPVEGFNFSTATLLTRYLEATADIPADPPTLLPRI

SEQ ID NO: 683 - protein, 568 aa, Quercus Alba
MASPTLISDTGAWKDLKGHVEEINKTHLRDLMADAERCKSMMVEFDGVLLDYSRQRATNETVDKLFKLAEEAKLKEKINRMYNGEHINSTENRSVLHVALRASRDAVIKSDGKNVVPEVWSVLDKIKDFSERVRSGSWVGATGKVLKDVVAVGIGGSFLGPLFVHTALQTDPEAIKSARGRQLRFLANVDPIDVARNITGLNPETTLVVVVSKTFTTAETMLNARTLREWISAALGPSAVAKHMVAVSTNLTLVEKFGIDPNNAFAFWDWVGGRYSVCSAVGVLPLSLQYGFSVVEQFLKGASSIDQHFYSAPHEKNIPVLLGLLSVWNVSFFGYPARAILPYSQALEKFAPHIQQVSMESNGKGVSIDGVPLPFEAGEIDFGEPGTNGQHSFYQLIHQGRVIPCDFIGVVKSQQPVFLKGEVVSNHDELMSNFFAQPDALAYGKTPEQLHKENVAPHLIPHKTFSGNRPSLSLLLPSLNAYNIGQLLAIYEHRIAVEGFVWGINSFDQWGVELGKSLATQVRKQLHVSRTKGEPVEGFNFSTATLLTRYLEATADIPADPPTLLPRI

SEQ ID NO: 684 - protein, 211 aa, Ambrosia Artemisiifolia
DERENHGNMKRVESDSSLYETEDDGEDGEGNKIVLGPQCTLKEQFEKDKDDESLRKWKEQLLGNVDINNVGESLEPDVKILSLSIVSPGRSDIILPIPESGKPEGRWFTLKEGCHYNLKFSFQVSHNIVAGLKYTNHVWKTGVRVYNIKEMLGTFSPQLEPYTFVTPEETTPSGYFARGSYSAKSRFVDDDNKCYLEINYSFDIRKDWANA

SEQ ID NO: 685 - protein, 182 aa, Ambrosia Psilostachya
DEEDTQIQLGPKISIREHLEKDKDDESLRRWKEQLLGSVDVSQVEEVQEPDVKILSLTIISADRPDIVLEIPNPGNPKAPWFTLKEGSKYNLKFSIKVSNDIVCGLRYTNHVWKTGLKVDNSKEMLGTFSPQPEPYTHIMPEEVTPSGFLARGNYSAKTKFFDDDNKCYLELNYTFDIQKDW

SEQ ID NO: 686 - protein, 211 aa, Ambrosia Psilostachya
DERENHGNMKRVESDSSLYETEDDGEDGEGNKIVLGPQCTLKEQFEKDKDDESLRKWKEQLLGNVDINNVGESLEPDVKILSLSIVSPGRSDIILPIPESGKPEGRWFTLKEGCHYNLKFSFQVSHNIVAGLKYTNHVWKTGVRVYNIKEMLGTFSPQLEPYTFVTPEETTPSGYFARGSYSAKSKFVDDDNKCYLEINYSFDIRKDWANA

SEQ ID NO: 687 - protein, 53 aa, Ambrosia Psilostachya
EPYTYAGEEETTPAGMFARGSYSAKLKFVDDDGKVYLEMSYYFEIRKDWPATQ

SEQ ID NO: 688 - protein, 187 aa, Betula Verrucosa
DQEEEDDEGNKLELGPQYTLKQQLEKDKDDESLRRWKEQLLGSVDLNNVGETLDPDVKILSLSIVSPGRSDIVVPIPEDGNPKGLWFTLKEGSKYCLKFSFQVSNNIVSGLKYTNTVWKSGIRVDSSKEMLGTFSPQLEPYVHVMPEESTPSGIFARGSYSAKSKFLDDDNKCYLEINYTFGIRKEW

SEQ ID NO: 689 - protein, 182 aa, Cynodon Dactylon
KRTVVLGPQVPLKEQLELDKDDESLRRWKEQLLGQVDTEQLGETAEPEVKVLNLTILSPGRPDLVLPIPFQPDEKGYAFALKDGSPYSFRFSFIVSNNIVSGLKYTNTVWKTGVRVENQKMMLGTFSPQLEPYVYEGEEETTPAGMFARGSYSAKLKFVDDDGKVYLEMSYYFEIRKEWPAA

SEQ ID NO: 690 - protein, 190 aa, Quercus Alba
TDQEEEDDERSKLQLGPQYTLKEQLEKDKDDESLRRWKEQLLGSVDLNNVGETLEPDVKIFCLSIISPGRSDIVLPIPEDGKPKGIWFTLKEGSKYKLKFSFQVSNNIVSGLKYTNTVWKTGIKVDSSKEMIGTFSPQIEPYTHIMQEETTPSGMFSRGSYSARSKFLDDDNKCYLEINYGFDIRKEWAS

SEQ ID NO: 691 - protein, 478 aa, Ambrosia Artemisiifolia
MANFTVNRVVTSPIEGQKPGTSGLRKKVKVFTQPHYLHNFVQSTFNALSAEKVKGSTLVVSGDGRYYSKDAIQIIIKMAAANGVRRVWVGQNGLLSTPAVSAVVRERVGADGSKANGAFILTASHNPGGPNEDFGIKYNMGNGGPAPEGITDKIFENTKTIKEYFIAEGLPDVDISAIGVSNFSGPGGQFDVDVFDSASDYVKLMKSIFDFQSIKKLITSPQFSFCFDALHGVGGAYAKRMFVEELGAKESSLLNCVPKEDFGGGHPDPNLTYAKELVARMGLGTNPDSNPPEFGAAADGDADRNMILGKRFFVTPSDSVAIIAANAVQAIPYFSSGLKGVARSMPTSAALDVVAKSLNLKFFEVPTGWKFFGNLMDAGLCSICGEESFGTGSDHIREKDGIWAVLAWLSILAHKNKDNLDGGKLVTVEDIVKQHWATFGRHYYTRYDYENVDAGAAKEVMAHLVDLQSSISGVNTTI

SEQ ID NO: 692 - protein, 376 aa, Ambrosia Psilostachya
SIFDFQSIKKLITSPQFSFCFDALHGVGGAYAKRMFVEELGAKESSLLNCVPKEDFGGGHPDPNLTYAKELVARMGLGTNPDSNPPEFGAAADGDADRNMILGKRFFVTPSDSVAIIAANAVQAIPYFSSGLKGVARSMPTSAALDVVAKSLNLKFFEVPTGWKFFGNLMDAGLCSICGEESFGTGSDHIREKDGIWAVLAWLSILAHKNKDNLDGGKLVTVEDIVKQHWATFGRHYYTRYDYENVDAGAAKEVMAHLVDLQSSISGVNTTIKGIRSDVADVVSADEFEYKDPVDGSVSKNQGIRYLFEDGSRLVFRLSGTGSEGATIRLYIEQYEKDSSKTGRDSQEALAPLVDVALKLSKMLEYTGRSAPTVIT

SEQ ID NO: 693 - protein, 583 aa, Betula Verrucosa
MVVFKVARVESTPFDGQKPGTSGLRKKVKVFIQPNYLENFVQSTFNALTPEKVRGATLVVSGDGRYYSKDAIQIIIKMAAANGVRRVWVGQNGLLSTPAVSAVIRERVAVDGSRASGAFILTASHNPGGPHEDFGIKYNMENGGPAPEGLTDKIYENTKTIKEYFIAEDLPDVDITTTGVTRFGGPEGQFDVDVFDSASDYVKLMKSIFDFELIRKLLSSPKFTFCYDALHGVAGAYAKRIFVEELGAQESSLLNCTPKEDFGGGHPDPNLTYAKELVARMGLGKSNSQDEVPEFGAAADGDADRNMILGKRFFVTPSDSVAIIAANAVQAIPYFSAGLKGVARSMPTSAALDVVAKHLNLKFFEVPTGWKFFGNLMDAGLCSVCGEESFGTGSDHIREKDGIWAVLAWLSILAHKNKENLGGEKLVTVEDIVRQHWATYGRHYYTRYDYENVDAAAAKALMAYLVKLQSSLSEVNEIVKGVRSDVAKVVDADEFEYKDPVDGSISKHQGIRYLFEDGSRLVFRLSGTGSEGATIRLYIEQYEKDPSKIGRDSQEALAPLVEVALKLSKMQEFTGRGAPTVIT

SEQ ID NO: 694 - protein, 583 aa, Cynodon Dactylon
MVLFTVTKKATTPFEGQKPGTSGLRKKVTVFQQPNYLQNFVQATFNALPADQVKGATIVVSGDGRYFSKDAVQIITKMAAANGVRRVWVGQNSLMSTPAVSCVIRDRVGSDGSKATGAFILTASHNPGGPTEDFGIKYNMGNGGPAPESVTDKIFSNTKTISEYLISEDLPDVDISVVGVTSFSGPEGPFDVDVFDSSVDYIKLMKSIFDFEAIKNLVTSPKFTFCYDALHGVAGAYAKQIFVEELGADESSLLNCVPKEDFGGGHPDPNLTYAKELVERMGLGKSTSNVEPPEFGAAADGDADRNMILGKRFFVTPSDSVAIIAANAVQSIPYFSSGLKGVARSMPTSAALDVVAKNLNLKFFEVPTGWKFFGNLMDAGMCSICGEESFGTGSDHIREKDGIWAVLAWLSILAFKNKDNLRGDKLVSVEDIVRQHWATYGRHYYTRYDYENVDAGAAKELMANLVSMQSSLSDVNKLIKEIRSDVSDVVAADEFEYKDPVDGSVSKHQGIRYLFGDGSRLVFRLSGTGSVGATIRVYIEQYEKDSSKIGRESQDALAPLVDVALKLSKMQEYTGRSAPTVIT

SEQ ID NO: 695 - protein, 582 aa, Quercus Alba
MVFKVSRVETKPIDGQKPGTSGLRKKVKVFIQPHYLHNFVQSTFNALTPEKVRGATLVVSGDGRYYSKDAIQIITKMSAANGVRRVWVGQNGLLSTPAVSAVIRERVGVDGSRASGAFILTASHNPGGPNEDFGIKYNMENGGPAPEGITDKIYENTKTIKEYFISEDLPDVDISAVGVTSFAGPEGQFDVEVFDSASDYVKLMKSIFDFESIRKLISSPKFTFCYDALHGVAGAYAKRIFVEELGAQESSLLNCTPKEDFGGGHPDPNLTYAKELVARMGLGKSSSQGEPPEFGAAADGDADRNMILGKRFFVTPSDSVAIIAANAVESIPYFSAGLKGVARSMPTSAALDVVAKHLNLKFFEVPTGWKFFGNLMDAGLCSVCGEESFGTGSDHIREKDGIWAVLAWLSILAHKNKENLGEEKLVSVEDIVRQHWTTYGRHYYTRYDYENVDAGAAKELMAYLVKLQSSLPEVNEIVKGTRSDVSKVINADEFEYKDPVDGSISKHQGIRYLFEDGSRLVFRLSGTGSEGATIRLYIEQYEKDPSKTGRDSQDALAPLVEVALKLSKMQEFTARTAPTVIT

SEQ ID NO: 696 - protein, 248 aa, Ambrosia Artemisiifolia
KCYPVVSEEYKKAVDKARKKLRGFIAEKRCAPLMLRLAWHSAGTYDVNTKTGGPFGTMRYKAELSHGANNGLDIAVRLLEPIKEQFPILSYGDFYQLAGVVAVEVTGGPDVPFHPGRVDKEEPPVEGRLPDATKGTDHLRDVFVKTMGLEDIDIVTLSGGHTLGAAHKERSGFEGPWTPNPLIFDNSYFTELLAGEKEGLLKLPTDKALLEDPVFRPLVDKYAADEDAFFADYAVSHMKLSELGFADA

SEQ ID NO: 697 - protein, 209 aa, Ambrosia Artemisiifolia
LAWHSAGTFDVQSKTGGPFGTMRHKAELAHGANNGLDIAVRLLEPLKEQFPEISYADFYQLAGVVAVEVTGGPEVPFHPGREDKPEPPQEGRLPDATKGCDHLRDVFIKQMGLTDQDIVALSGGHTLGRCHKERSGFEGPWTANPLVFDNSYFKELLSGEKEGLLQLPTDKALLSDPVFRPFVEKYAADEDAFFADYAEAHLKLSELGF

SEQ ID NO: 698 - protein, 247 aa, Ambrosia Psilostachya
KSYPCVSEEYKKAVDKARRKLRGFIADKRCAPLMLRLAWHSAGTYDVKTKTGGPFGTMRYKAELSHGANNGLDIAVRLLEPIKEQFPNISYGDFYQLAGVVAVEIAGGPEVPFHPGREDKEEPPLEGRLPDATKGNDHLRDVFVKTMGLDDIDIVTLSGGHTLGAAHKERSGFEGPWTPNPLIFDNSYFTELLAGEKEGLLKLPTDKALLEDPVFRPLVEKYAADEDAFFADYAVSHMKLSELGFAE

SEQ ID NO: 699 - protein, 212 aa, Ambrosia Psilostachya
LAWHSAGTFDVQSKTGGPFGTMRHKAELAHGANNGLDIAVRLLEPLKEQFPEISYADFYQLAGVVAVEVTGGPEVPFHPGREDKPEPPQEGRLPDATKGCDHLRDVFIKQMGLTDQDIVALSGGHTLGRCHKERSGFEGPWTANPLVFDNSYFKELLSGEKEGLLQLPTDKALLSDPVFRPFVEKYAADEDAFFADYAEAHLKLSELGFADA

SEQ ID NO: 700 - protein, 219 aa, Betula Verrucosa
DCLWLLWRCSWHSAGTFDVETKTGGPFGTIRHPDELAHEANSGLDIAIRLLEPIKEQFPILSYADFYQLAGVVAVEVTGGPEIPFHPGRPDKTEPPPEGRLPDATKGSDHLRDIFGHMGLSDKDIVALSGGHTLGRCHKERSGFEGPWTNNPLIFDNSYFKELLSGEKEGLIQLPSDKALLEDPVFRPLVEKYAADEDAFFADYAEAHLKLSELGFADA

SEQ ID NO: 701 - protein, 247 aa, Cynodon Dactylon
KSYPAVSEDYLKAVDKAKRKLRGLIAEKNCAPLILRLAWHSAGTFDVATKSGGPYGTMKNPSEQAHAANAGLDIAVRLLEPIKEQFPILSYADFYQLAGVVAVEVTGGPDVPFHPGREDKPEPPPEGRLPDATKGSDHLRQVFATQMGLSDQDIVALSGGHTLGRCHKDRSGFEGAWTSNPLIFDNSYFKELLSGEKEGLLQLPSDKALLSDPSFRPLVEKYAADEDAFFADYAEAHLKLSELGFAE

SEQ ID NO: 702 - protein, 250 aa, Cynodon Dactylon
MAKNYPTVSAEYQEAVEKARRKLRALIAEKSCAPLMLRLAWHSAGTFDVSTKTGGPFGTMKNPAEQAHGANAGLDIAVRMLEPVKEEFPILSYADLYQLAGVVAVEVTGGPEIPFHPGREDKPQPPPEGRLPDATKGTDHLRQVFGKQMGLSDQDIVALSGGHTLGRCHKERSGFEGPWTRNPLCFDNSYFTELLTGDKEGLLQLPSDKALLNDPVFRPLVEKYAADEKAFFEDYKEAHLRLSELGFADA

SEQ ID NO: 703 - protein, 250 aa, Quercus Alba
MTKQYPSVSAEYQKTVEKARRKLRGLIAEKHCAPLMLRIAWHSAGTFDQKTKTGGPFGTMKQAAELSHGANNGLDIAVRLLEPIKEQFPTLSYADFYQLAGVVAVEITGGPEVPFHPGREDKPQPPPEGRLPDATKGSDHLRVVFGQQMGLSDQDIVALSGGHTLGRCHKERSGFEGPWTANPLIFDNSYFKELLSGEKEGLLQLPSDKALLADPVFRPLVEKYAADEDAFFADYAEAHLKLSELGFAEA

SEQ ID NO: 704 - protein, 464 aa, Ambrosia Artemisiifolia
EKLNNLRSAVSSLTQISENEKSGFINLVSRYLSGEAEHVEWSKIQTPTDKIVVPYDTLSAVPEDAAETKSLLDKLVVLKLNGGLGTTMGCTGPKSVIEVRNGLTFLDLIVIQIESLNKKYGCSVPLLLMNSFNTHEDTQKIIEKYAGSNIEIHTFNQSQYPRLVVDDFLPLPSKGETGKDGWYPPGHGDVFPSLMNSGKLDALLSQGKEYVFVANSDNLGAVVDLKILNHLIQNKNEYCMEVTPKTLADVKGGTLISYDGKVQLLEIAQVPDEHVNEFKSIEKFKIFNTNNLWVNLNAIKRLVQADALKMEIIPNPKEVNGVKVLQLETAAGAAIKFFDNAIGINVPRSRFLPVKASSDLLLVQSDLYTEKDGYVIRNPARTDPANPSIELGPEFKKVGDFLKRFKSIPSIIELASLKVSGDVWFGSNVVLKGKVVVAANSGEKLEIPDGAVLENKEVHSAGDI

SEQ ID NO: 705 - protein, 482 aa, Ambrosia Psilostachya
YHHSRSKSINQSMAAADTEKLNNLRSAVSSLTQISENEKSGFINLVSRHLSGEAEHVEWSKIQTPTDKIVVPYDTLSAVPEDAAETKSLLDKLVVLKLNGGLGTTMGCTGPKSVIEVRNGLTFLDLIVIQIESLNKKYGCSVPLLLMNSFNTHEDTQKIIEKYAGSNIEIHTFNQSQYPRLVVDDFLPLPSKGETGKDGWYPPGHGDVFPSLMNSGKLDALLSQGKEYVFVANSDNLGAVVDLKILNHLIQNKNEYCMEVTPKTLADVKGGTLISYDGKVQLLEIAQVPDAHVNEFKSIEKFKIFNTNNLWVNLNAIKRLVQADALKMEIIPNPKEVNGVKVLQLETAAGAAIKFFDNAIGINVPRSRFLPVKASSDLLLVQSDLYTEKDGYVIRNPARTDPANPSIELGPEFKKVGDFLKRFKSIPSIIELASLKVSGDVWFGSNVVLKGKVVVAANSGEKLEIPDGAVLENKEVHSAGDI

SEQ ID NO: 706 - protein, 464 aa, Ambrosia Psilostachya
EKLNNLRSAVSSLTQISENEKSGFINLVSRHLSGEAEHVEWSKIQTPTDKIVVPYDTLSAVPEDAAETKSLLDKLVVLKLNGGLGTTMGCTGPKSVIEVRNGLTFLDLIVIQIESLNKKYGCSVPLLLMNSFNTHEDTQKIIEKYAGSNIEIHTFNQSQYPRLVVDDFLPLPSKGETGKDGWYPPGHGDVFPSLMNSGKLDALLSQGKEYVFVANSDNLGAVVDLKILNHLIQNKNEYCMEVTPKTLADVKGGTLISYDGKVQLLEIAQVPDAHVNEFKSIEKFKIFNTNNLWVNLNAIKRLVQADALKMEIIPNPKEVNGVKVLQLETAAGAAIKFFDNAIGINVPRSRFLPVKASSDLLLVQSDLYTEKDGYVIRNPARTDPANPSIELGPEFKKVGDFLKRFKSIPSIIELASLKVSGDVWFGSNVVLKGKVVVAANSGEKLEIPDGAVLENKEVHSAGDI

SEQ ID NO: 707 - protein, 491 aa, Anthoxanthum Odoratum
PHPTSDRPSSILSSPSARTTHLATMADEKLAKLREAVAGLGQISDNEKSGFISLVSRYLSGDEEHIEWPKIHTPTDEVVVPYDTIDAPPEDLEATKALLNKLAVLKLNGGLGTTMGCTGPKSVIEVRNGFTFLDLIVLQIESLNKKYGSNVPLLLMNSFNTHDDTLKIVEKYANSSIDIHTFNQSQYPRVVADEFLPWPSKGKTDKDGWYPPGHGDIFPSLMNSGKLDLLLSQGKEYVFIANSDNLGAIVDMKILNHLIHKQNEYCMEVTPKTLADVKGGTLISYEGRVQLLEIAQVPDAHVDEFKSIEKFKIFNTNNLWVNLKAIKRLVEADALKMEIIPNPKEVEGVKVLQLETAAGAAIRFFDHAIGINVPRSRFLPVKATSDLQLVQSDLYTLVDGFVTRNSARTDPSNPSIELGPEFKKVGSFLGRFKSIPSIVELDSLKVSGDVWFGSGIVLKGKVTITAKPGVKLEIPDGAVLENKDIKGAEDL

SEQ ID NO: 708 - protein, 464 aa, Betula Verrucosa
EKLNKLKSAVDGLNQISENEKIGCINLVARYLSGEAQHVEWSKIQTPTDEIVVPYESLAPTTDDPVETKKLLDKLVVLKLNGGLGTTMGCTGPKSVIEVRNGLTFLDLIVIQIENLNSKYGCNVPLLLMNSFNTHDDTLKIVERYSGSKVEIHTFNQSQYPRLVVDDFSPLPSKGQTGKDGWYPPGHGDVFPSLKNSGKLDALLSQGKEYVFIANSDNLGAVVDLKILNHLVHNKNEYCMEVTPKTLADVKGGTLISYEGRVQLLEIAQVPDDHVNEFKSIEKFKIFNTNNLWVNLKAIKRLVETDALKMEIIPNPKEVDGIKVLQLETAAGAAIKFFDDAIGINVPRSRFLPVKATSDLLLVQSDLYTLEDGFVIRNEARKNPANPSIELGPEFKKVGNFLSRFKSIPSIIELDSLKVAGDVWFGTGVTLKGKVSIVAKPGVKLEIPDGAVLENKEINGPEDL

SEQ ID NO: 709 - protein, 528 aa, Betula Verrucosa
PFSFQFSFTSITMASEMATHLKPNGGAEFEKRHHGKTQSHVAFENTSTSVAASQMRNALNNLCDEVTDPAEKQRFETEMDNFFALFRRYLNDKAKGNEIEWSRIAPPKPEQVVAYEDLPQQESVDFLNKLAVLKLNGGLGTSMGCVGPKSVIEVRDGMSFLDLSVRQIEYLNRTYGVNVPFVLMNSFNTDSDTANIIKKYEGHNIDIMTFNQSRYPRVLKDSLLPAPKSANSQISDWYPPGHGDVFESLYNSGILDKLLERGVEIVFLSNADNLGAVVDLKILQHMVDTKAEYIMELTDKTKADVKGGTIIDYEGQARLLEIAQVPKEHVNEFKSIKKFKYFNTNNIWMNLRAVKRIVENNELAMEIIPNGKSIPADKKGEADVSIVQLETAVGAAIRHFHNAHGVNVPRRRFLPVKTCSDLMLVKSDLYTLKHGQLIMDPNRFGPAPLIKLGGDFKKVSSFQSRIPSIPKILELDHLTITGPVNLGRGVTCKGTVIIVASEGQTIDIPPGSILENVVVQGSLRLLEH

SEQ ID NO: 710 - protein, 520 aa, Betula Verrucosa
LAGSLRMTIHSVVIQKLLSTNAHLGRRVAADHFKAYTYGIRNGMAIIDSDKTLIALRSACAFIGAMARQKARFMFVNTNPLFDEIFEQMTKRIGLYNPNQNSLWRTGGFLTNSFSPKRFRSRNKKLCFAPAQPPDCVVILDTERKSSVIFEAEKLQIPVVALVDSSMPLDVYKRIAYPVPANDSVQFVYLFCNLITKTFLLEQKRFGGTAREDSAAAIPSADDASKIENHREEVKRIEERESDSVGYAKDEVLVVPYESLTPVSGDGAEIKELLDKLVVLKFNGTLGTELGFDGPKSAIEVCNGLTFLDLIVNQIESLNSKYGCNVPLLLMNTIKTNDDSVKVLEKYPKSNIVMLKSFDGQTCEKESYPSDHDMEFLSLMKGGTLDVLLSQGKEYILVVGSDNVAAGIDPKILKHLVQNKIEYCMEVTPTTSFGKDNDILNSSQQKFQLAKIARNSAPHSMDKFKLVDTRSLWLNLRATKRLVDTDALNFENYSVSKGRETAAGSTIRFFDRAIGINVPQ

SEQ ID NO: 711 - protein, 476 aa, Betula Verrucosa
AMAAATLNTADAEKLNKLKSAVDGLNQISENEKIGCINLVARYLSGEAQHVEWSKIQTPTDEIVVPYESLAPTTDDPVETKKLLDKLVVLKLNGGLGTTMGCTGPKSVIEVRNGLTFLDLIVIQIENLNSKYGCNVPLLLMNSFNTHDDTLKIVERYSGSKVEIHTFNQSQYPRLVVDDFSPLPSKGQTGKDGWYPPGHGDVFPSLKNSGKLDALLSQGKEYVFIANSDNLGAVVDLKILNHLVHNKNEYCMEVTPKTLADVKGGTLISYEGRVQLLEIAQVPDDHVNEFKSIEKFKIFNTNNLWVNLKAIKRLVETDALKMEIIPNPKEVDGIKVLQLETAAGAAIKFFDDAIGINVPRSRFLPVKATSDLLLVQSDLYTLEDGFVIRNEARKNPANPSIELGPEFKKVGNFLSRFKSIPSIIELDSLKVAGDVWFGTGVTLKGKVSIVAKPGVKLEIPDGAVLENKEINGPEDL

SEQ ID NO: 712 - protein, 490 aa, Cynodon Dactylon
PTPSSSSHLPVSSPLPDLSAHLAMADEKLAKLSEAVAGLAEISENEKSGFLSLVSRYLSGDEEHIEWAKIHTPTDEVVVPYDALETPPEDIEETKKLLDKLAVLKLNGGLGTTMGCTGPKSVIEVRNGFTFLDLIVLQIEALNKKYGSNVPLLLMNSFSTHDDTLKIVEKYANSNIDIHTFNQSKYPRVVADEFLPWPSKGKTCKDGWYPPGHGDIFPSLMNSGKLDLLLSQGKEYVFIANSDNLGAIVDMKILNHLIHKQNEYCMEVTPKTLADVKGGTLISYEGRVQLLEIAQVPDAHVHEFKSIEKFKIFNTNNLWVNLKAIKRLVEADALKMEIIPNPKEVDGVKVLQLETAAGAAIRFFDHAIGINVPRSRFLPVKATSDLQLVQSDLYTLVDGLVTRNEARTNPSNPSIELGPEFKKVGNFLGRFKSIPSIVELDSLKVSGDVWFGSGIVLKGKVSITAKPGVKLEIPDGAVIENKDISGPEDL

SEQ ID NO: 713 - protein, 467 aa, Cynodon Dactylon
MADEKLAKLSEAVAGLAEISENEKSGFLSLVSRYLSGDEEHIEWAKIHTPTDEVVVPYDALETPPEDIEETKKLLDKLAVLKLNGGLGTTMGCTGPKSVIEVRNGFTFLDLIVLQIEALNKKYGSNVPLLLMNSFSTHDDTLKIVEKYANSNIDIHTFNQSKYPRVVADEFLPWPSKGKTCKDGWYPPGHGDIFPSLMNSGKLDLLLSQGKEYVFIANSDNLGAIVDMKILNHLIHKQNEYCMEVTPKTLADVKGGTLISYEGRVQLLEIAQVPDAHVHEFKSIEKFKIFNTNNLWVNLKAIKRLVEADALKMEIIPNPKEVDGVKVLQLETAAGAAIRFFDHAIGINVPRSRFLPVKATSDLQLVQSDLYTLVDGLVTRNEARTNPSNPSIELGPEFKKVGNFLGRFKSIPSIVELDSLKVSGDVWFGSGIVLKGKVSITAKPGVKLEIPDGAVIENKDISGPEDL

SEQ ID NO: 714 - protein, 479 aa, Fraxinus Excelsior
LYSKMSTATLSAADKEKITKLQSAVSGLNQISENEKVGFVNLVTRYLSGEAQHVEWSKIQTPTDEVVVPYDTLTPVPEDPAETKKLLDKLVVLKLNGGLGTTMGCTGPKSVIEVRNGLTFLDLIVIQIETLNKKYGCSVPLLLMNSFNTHDDTLKIVEKYTNSNIEIHTFNQSQYPRLAIDNFTPLPCIKDAGKDGWYPPGHGDVFPSLVNSGKLEALLSQGKEYVFVANSDNLGAVVDLKILNHLISNKNEYCMEVTPKTLADVKGGTLISYEGKVQLLEIAQVSDEHVNEFKSIEKFKIFNTNNLWVNLNAIKRLVQADALKMEIIPNPKEVDGIKVLQLETAAGAAIRFFDRAIGINVPRSRFLPVKATSDLLLVQSDLYTLSDGFVTRNPARTNPANPSIELGPEFKKVANFLSRFKSIPSIIELDSLKVTGDVWFGSGIALKGKVTIAAKPGVKLEIPDGAVIANKDINGPEDI

SEQ ID NO: 715 - protein, 479 aa, Fraxinus Excelsior
LYSKMSTATLSAADKEKITKLQSAVSGLNQISENEKVGFVNLVTRYLSGEAQHVEWSKIQTPTDEVVVPYDTLTPVPEDPAETKKLLDKLVVLKLNGGLGTTMGCTGPKSVIEVRNGLTFLDLIVIQIETLNKKYGCSVPLLLMNSFNTHDDTLKIVEKYTNSNIEIHTFNQSQYPRLAIDNFTPLPCIKDAGKDGWYPPGHGDVFPSLVNSGKLEALLSQGKEYVFVANSDNLGAVVDLKILNHLISNKNEYCMEVTPKTLADVKGGTLISYEGKVQLLEIAQVSDEHVNEFKSIEKFKIFNTNNLWVNLNAIKRLVQADALKMEIIPNPKEVDGIKVLQLETAAGAAIRFFDRAIGINVPRSRFLPVKATSDLLLVQSDLYTLSDGFVTRNPARTNPANPSIELGPEFKKVANFLSRFKSIPSIIELDSLKVTGDVWFGSGIALKGKVTIAAKPGVKLEIPDGAVIANKEINGPQDI

SEQ ID NO: 716 - protein, 140 aa, Lollium Perenne
LISYEGKVQLLEIAQVPDEHVNEFKSIEKFKIFNTNNLWVNLNAIKRLVQADALKMEIIPNPKEVDGIKVLQLETAAGAAIKFFDRAIGINVPRSRFLPVKATSDLLLVQSDLYTLSDGFVTRNPARTNPANPSIELGPE

SEQ ID NO: 717 - protein, 492 aa, Lollium Perenne
SPSPTSDDPPLPFPQKHLPPHVHATMADEKLAKLREAVAGLGQISDNEKSGFISLVSRYLSGDEEHIEWPKIHTPTDEVVVPYDTIDAPPEDLEATKALLNKLAVLKLNGGLGTTMGCTGPKSVIEVRNGFTFLDLIVLQIESLNKKYGSNVPLLLMNSFNTHDDTLKIVEKYANSSIDIHTFNQSQYPRVVADEFLPWPSKGKTDKDGWYPPGHGDIFPSLMNSGKLDLLLSQGKEYVFIANSDNLGAIVDMKILNHLIHKQNEYCMEVTPKTLADVKGGTLISYEGRVQLLEIAQVPDAHVDEFKSIEKFKIFNTNNLWVNLKAIKRLVEADALKMEIIPNPKEVEGVKVLQLETAAGAAIRFFDHAIGMNVPRSRFLPVKATSDLQLVQSDLYTLVDGFVTRNSARTDPSNPSIELGPEFKKVGSFLGRFKSIPSIVELDSLKVSGDVWFGSGIVLKGKVTITAKPGVKLEIPDGKVIENKDINGVEDL

SEQ ID NO: 718 - protein, 511 aa, Lollium Perenne
THHHHHLTTSSHLKSPPVLSSSSASRSLLCLPARIAMAATAVAAGPDAKIEKFRDAVAKLDEISENEKAGCISLVSRYLSGEAEQIEWSKIQTPTDEVVVPYDTLAPAPEDLDAMKALLDKLVVLKLNGGLGTTMGCTGPKSVIEVRNGFTFLDLIVIQIESLNKKYGCDVPLLLMNSFNTHDDTQKIVEKYSNSNINIHTFNQSQYPRIVTEDFLPLPSKGKSGKDGWYPPGHGDVFPSLNNSGKLDTLLSQGKEYVFVANSDNLGAIVDIKILNHLINNQNEYCMEVTPKTLADVKGGTLISYEGRVQLLEIAQVPDEHVNEFKSIEKFKIFNTNNLWVNLKAIKRLVEADALKMEIIPNPKEVDGVKVLQLETAAGAAIRFFEKAIGINGPRSRFLPVKATSDLLLVQSDLYTLVDGYVIRNPARVKPSNPSIELGPEFKKVASFLARFKSIPSIVELDSLKVSGDVTFGSGVVLKGNVTIAAKSGVKLEIPDGAVLENKDINGPEDL

SEQ ID NO: 719 - protein, 476 aa, Olea Europaea
EMATATLSATDNEKISKLQSSVSGLNQISENEKAGFLNLVTRYLSGEAQHVEWSKIQTPTDEVVVPYDTLAPVPEDHAETKKLLSKLVVLKLNGGLGTTMGCTGPKSVIEVRNGLTFLDLIVIQIETLNKKYGCSVPLLLMNSFNTHDDTLKIVEKYANSNIEIHTFNQSQYPRLAVDNFTPLPCIKDAGKDGWYPPGHGDVFPSLMNSGKLEALLSQGKEYVFVANSDNLGAVVDMKILNHLINNKNEYCMEVTPKTLADVKGGTLISYEGKVQLLEIAQVPDEHVNEFKSIEKFKIFNTNNLWVNLNAIKRLVQADALKMEIIPNPKEVDGIKVLQLETAAGAAIKFFDRAIGINVPRSRFLPVKATSDLLLVQSDLYTLSDGFVTRNPARTNPANPSIELGPEFKKVANFLSRFKSIPSIIDLDSLKVTGDVWFGSGITLKGKVTIAAKPGVKLEIPDGAVIANKEINGPEDI

SEQ ID NO: 720 - protein, 476 aa, Plantago Lanceolata
KEMAAATLSQADAEKLSKLTSSVATLDGISENEKSGFISLVGRYLSGEAQHVEWSKIQTPTDEVVVPYDTMSPVPEDPAETKKLLDKLVVLKLNGGLGTTMGCTGPKSVIEVRNGLTFLDLIVVQIESLNAKYGCSVPLLLMNSFNTHDDTLKIVEKYSNSKIEIHTFNQSQYPRMVVEDFSPLPTKISGKDAWYPPGHGDVFPALMNSGKLDALIAQGKEYVFVANSDNLGAVVDLKILNHLVNNKNEYCMEVTPKTLADVKGGTLISYEGKVQLLEIAQVPDEHVNEFKSIEKFKIFNTNNLWVNLQSIKKLVQGDVLKMEIIPNPKEVEGIKILQLETAAGAAIRFFDHAIGANVPRARFLPVKATSDLLLVQSDLYTLSDGFVLRNPARTNPENPSIELGPEFKKVANFLGRFKSIPSIIGLDSLKVSGDVWFGAGITLKGKVTIAAKSGTKLEIPDGAVIADKEINGPEDI

SEQ ID NO: 721 - protein, 80 aa, Poa Pratensis
DLQLVQSDLYTLVDGLVTRNEARTNPSNPSIELGPEFKKVGNFLGRFKSIPSIVELDSLKVSGDVWFGSGIILKGKVTIT

SEQ ID NO: 722 - protein, 523 aa, Poa Pratensis
VNVAAFPHFPPATCSSLFSGINSQRHLLLLPPSTLLFPHIYLPLPSVRTRTHLAATMADEKLAKLGEAVTGLPQISDNEKSGFISLVSRYLSGDEEHIEWPKIHTPTDEVVVPYDAIDAPPEDLEATKALLDKLAVLKLNGGLGTTMGCTGPKSVIEVRNGFTFLDLIVLQIESLNKKYGSNVPLLLMNSFNTHDDTLKIVEKYANSSIDIHTFNQSQYPRVVADEFLPWPSKGKTDKDGWYPPGHGDIFPSLMNSGKLDLLLSQGKEYVFIANSDNLGAIVDMKILNHLIHKQNEYCMEVTPKTLADVKGGTLISYEGRVQLLEIAQVPDAHVDEFKSIEKFKIFNTNNLWVNLKAIKRLVEADALKMEIIPNPKEIDGVKVLQLETAAGAAIRFFDHAIGINVPRSRFLPVKATSDLQLVQSDLYTLVDGFVTRNSARTDPSNPSIELGPEFKKVGSFLGRFKSIPSIVELESLKVSGDVWFGSGIVLKGKVTITAKPGVKLEIPDGAVLENKDINGAEDL

SEQ ID NO: 723 - protein, 476 aa, Quercus Alba
TMAAPTLSAADAEKLNSLKSSVAALPQISENEKNGFINLIARFLSGEAQHVDWSKIQTPTDEVVVPYDTLKPAPHDPAETKKLLDKLVVLKLNGGLGTTMGCTGPKSVIEVRNGLTFLDLIVIQIENLNKQYGCNVPLLLMNSFNTHDDTQKIVEKYSGANVEIHTFNQSQYPRLVVEDFSPLPSKGVTGKDGWYPPGHGDVFPSLRNSGKLDLLLSQGKEYVFIANSDNLGAVVDLKILNHLVHNKNEYCMEVTPKTMADVKGGTLISYEGRVQLLEIAQVPDEHVNEFKSIEKFKIFNTNNLWANLKAIKRLVEADALKMEIIPNPKEVEGIKVLQLETAAGAAIRFFDNAIGNNVPRSRFLPVKATSDLLLVQSDLYTLEDGFVIRNKARTNPANPSIELGPEFKKVGNFLNRFKSIPSIVELDSLKVTGDVWFGANITLKGKVTIVAKPGAKLEIPDGAVLENKEINGPEDI

SEQ ID NO: 724 - protein, 640 aa, Quercus Alba
TPKPPNETVTMTIHSVVIQKLLSTNAHLGRRVVADHLKPYAYGVRNGMAILDSDKTLISLRTACAFIGALARNNARFMFVNTNPLFDEIFDQMTKKIHLYNPNQNTLWRTGGFLTNSRSPKKFRSRNKKLCFAPPQPPDCVVILDTERKSSVVLEADRLQIPVVAIVDSSMPLDIYKRIAYPVPANDSVQFVYLFCNLITKTFLAEQKRFAKHDSIAVDDDSSKIENTEEAKRVEESEKVGVSPKDEVVVVPYESLAPISQDRAEAKELLEKLVVLKFNGALGKEMGFNGPKSVIEVCKGSTVLDLIVKQIESLNSKYGCNVPLLLMNTAKTNDDTVKVVEKYPNSNIVTLNTSDGQASENEAYPSDHDMVFLSLMNGGTLDVLLSQGKEYILVVGSDNVAAVVDPNILNHLIQNKLEYCMEVTPTTLFDTNNSILNSHQQKFQLAEIARNSNEHLADKFKLTDTRSLWVNLRAIKRLVDTDALKIENYTVSKGGKNDKILSPKTAAGSAIQFFDHAIGINVPQSRYLPMNATSDLLLLQSDLYTSNNGVLVRNSARTNPLNPSIILGPEFGKVSDLLSRFKSFPSIVELDSLKVTGDVWFGADVTLKGRVNIVAKPGMKLEIPDRAVLHNKDISDPIDI

SEQ ID NO: 725 - protein, 464 aa, Quercus Alba
EKLNSLKSSVAALPQISENEKNGFINLIARFLSGEAQHVDWSKIQTPTDEVVVPYDTLKPAPHDPAETKKLLDKLVVLKLNGGLGTTMGCTGPKSVIEVRNGLTFLDLIVIQIENLNKQYGCNVPLLLMNSFNTHDDTQKIVEKYSGANVEIHTFNQSQYPRLVVEDFSPLPSKGVTGKDGWYPPGHGDVFPSLRNSGKLDLLLSQGKEYVFIANSDNLGAVVDLKILNHLVHNKNEYCMEVTPKTMADVKGGTLISYEGRVQLLEIAQVPDEHVNEFKSIEKFKIFNTNNLWANLKAIKRLVEADALKMEIIPNPKEVEGIKVLQLETAAGAAIRFFDNAIGNNVPRSRFLPVKATSDLLLVQSDLYTLEDGFVIRNKARTNPANPSIELGPEFKKVGNFLNRFKSIPSIVELDSLKVTGDVWFGANITLKGKVTIVAKPGAKLEIPDGAVLENKEINGPEDI

SEQ ID NO: 726 - protein, 359 aa, Ambrosia Artemisiifolia
DDKVTVESAEATLKYNVAIKCATITPDEARMKEFTLKSMWKSPNGTIRNILNGTVFREPILCKNIPRLIPGWTKPICIGRHAFGDQYKATDAVIKGPGKLKMVFVPEGEGENTELEVYNFTGAGGVALSMYNTDESITAFAEASMNTAYLKKWPLYLSTKNTILKKYDGRFKDIFQEVYEKNWKSKFEAAGIWYEHRLIDDMVAYALKSDGGYVWACKNYDGDVQSDFLAQGFGSLGLMTSVLVCPDGKTIEAEAAHGTVTRHYRVHQKGGETSTNSIASIFAWTRGLAHRAKLDDNAKLLDFTEKLEAACIGCVESGKMTKDLALIIHGSKLSREHYLNTEEFIDAVADELKARLSSN

SEQ ID NO: 727 - protein, 397 aa, Ambrosia Psilostachya
GDEMTRVFWESIKNKLIFPFLDLDIKYYDLGLLNRDATDDKVTVESAEATLKYNVAIKCATITPDEARMKEFTLKSMWKSPNGTIRNILNGTVFREPILCKNIPRLIPGWTKPICIGRHAFGDQYKATDAVIKGPGKLKMVFVPEGEGENTELEVYNFTGAGGVALSMYNTDESITAFAEASMNTAYLKKWPLYLSTKNTILKKYDGRFKDIFQEVYEKNWKSKFEAAGIWYEHRLIDDMVAYALKSDGGYVWACKNYDGDVQSDFLAQGFGSLGLMTSVLVCPDGKTIEAEAAHGTVTRHYRVHQKGGETSTNSIASIFAWTRGLAHRAKLDDNAKLLDFTEKLEAACIGCVESGKMTKDLALIIHGSKLSREHYLNTEEFIDAVADELKARLSSN

SEQ ID NO: 728 - protein, 417 aa, Ambrosia Psilostachya
SVNKMGFEKIKVANPIVEMDGDEMTRVFWESIKNKLIFPFLDLDIKYYDLGLLNRDATDDKVTVESAEATLKYNVAIKCATITPDEARMKEFTLKSMWKSPNGTIRNILNGTVFREPILCKNIPRLIPGWTKPICIGRHAFGDQYKATDAVIKGPGKLKMVFVPEGEGENTELEVYNFTGAGGVALSMYNTDESITAFAEASMNTAYLKKWPLYLSTKNTILKKYDGRFKDIFQEVYEKNWKSKFEAAGIWYEHRLIDDMVAYALKSDGGYVWACKNYDGDVQSDFLAQGFGSLGLMTSVLVCPDGKTIEAEAAHGTVTRHYRVHQKGGETSTNSIASIFAWTRGLAHRAKLDDNAKLLDFTEKLEAACIGCVESGKMTKDLALIIHGSKLSREHYLNTEEFIDAVADELKARLSSN

SEQ ID NO: 729 - protein, 81 aa, Ambrosia Psilostachya
YNFTGAGGVAIAMYNTDESIRAFAEASMNTAYQKKWPLYLSTKNTILKKYDGRFKDIFQEVYEANWKSKYEAAGISYAVFC

SEQ ID NO: 730 - protein, 440 aa, Anthoxanthum Odoratum
CRRPPTHLPRLAPLRSRSPRQAAPAEAAMAFEKIKVANPIVEMDGDEMTRVFWQSIKDKLIFPFLDLDIKYYDLGVLHRDATDDKVTVEAAEATLKYNVAIKCATITPDEDRVKEFNLKQMWRSPNGTIRNIINGTVFREPIICKNVPKLVPGWTKPICIGRHAFGDQYRATDAVLKGPGKLRLVFEGKDETVDLEVFNFTGAGGVALAMYNTDESIQGFAEASMAIAYEKKWPLYLSTKNTILKKYDGRFKDIFQAVYEAGWKSKYEAAGIWYEHRLIDDMVAYALKSEGGYVWACKNYDGDVQSDFLAQGFGSLGLMTSVLMCPDGKTIEAEAAHGTVTRHYRVHQKGGETSTNSIASIFAWTRGLAHRAKLDDNARLLDFTQKLEDACVGTVESGKMTKDLALLVHGSSKVTRGDYLNTEEFIDAVAAELQSRLAAN

SEQ ID NO: 731 - protein, 396 aa, Betula Verrucosa
GDEMTRVFWKSIKDKLIFPFVELDIKYFDLGLPHRDATDDKVTIESAEATLKYNVAIKCATITPDEDRVKEFKLKQMWKSPNGTIRNILNGTVFREPIICKNIPRLVPSWNKPICIGRHAFGDQYRATDTVIKGAGKLKLVFVPEGKEEKTELEVYNFTGAGGVALSMYNTDESIRSFAEASMNTAYQKKWPLYLSTKNTILKKYDGRFKDIFQEVYVANWKSKYEAAGIWYEHRLIDDMVAYALKSDGGYVWACKNYDGDVQSDFLAQGFGSLGLMTSVLVCPDGKTIEAEAAHGTVTRHFRVHQKGGETSTNSIASIFAWSRGLAHRAKLDENPRLLDFTEKLEAACIGVVESGKMTKDLALIIHGPKLAREHYLNTEEFIDAVAAELRARLSA

SEQ ID NO: 732 - protein, 506 aa, Betula Verrucosa
KVRQKPRMLSPRATTTLRLSAMSGAKMLTSSCSSSASSSMALRSPRLHLQFPSSGPKLSNGVVLRGNRVSFASSSTRFAHASLRCYASSAGSDRVRVENPIVEMDGDEMTRIIWKMIKDKLIFPYLDLDIKYFDLGISNRDATDDKVTVESAEAALKYNVAVKCATITPDETRVKEFGLKSMWRSPNGTIRNILNGTVFREPIICCNIPRIITGWKKPICIGRHAFGDQYRATDTVIEGPGKLKMVFVPEDGSTPVELDVFDFKGPGVALAMYNVDESIRVFAESSMSLAFAKKWPLYLSTKNTILKKYDGRFKDIFQEVYEEKWKQMFEENSIWYEHRLIDDMVAYAIKSEGGYVWACKNYDGDVQSDLLAQGFGSLGLMASVLLSSDGKTLEAEAAHGTVTRHFRLHQKGQETSTNSIASIFAWTRGLEHRGKLDKNERLLDFVHKLEAACIETVEMGKMTKDLAILIHGSKVSREHYLNTEEFIDAVAQNLEVKLREPAPVTL

SEQ ID NO: 733 - protein, 147 aa, Betula Verrucosa
ATLKYNVAIKCATITPDEDRVKEFNLKQMWKSPNGTIRNILNGTVFREPIICKNIPRLVPGWTKPICIGRHAFGDQYRATDTVIKGSGKLKLVFVPDGHYEKKEFEVFNFTGAGGVALSMYNTDESIRSFAEASMNTAYQKKWPLYL

SEQ ID NO: 734 - protein, 91 aa, Betula Verrucosa
ETSTNSIASIFAWTRGLAHRAKLDGNARLLDFTENLEAACVGVVESGKMTKDLALLIHGPKVTRSKYLNTEEFIDHVAEELRARLFTKAKL

SEQ ID NO: 735 - protein, 450 aa, Betula Verrucosa
FNIKGSSCLSTFAPLSPSIFVFVPIPARLSLFRAFREKMALEKIKVANPIVEMDGDEMTRVFWKSIKDKLIFPFVELDIKYFDLGLPHRDATDDKVTIESAEATLKYNVAIKCATITPDEDRVKEFKLKQMWKSPNGTIRNILNGTVFREPIICKNIPRLVPSWNKPICIGRHAFGDQYRATDTVIKGAGKLKLVFVPEGKEEKTELEVYNFTGAGGVALSMYNTDESIRSFAEASMNTAYQKKWPLYLSTKNTILKKYDGRFKDIFQEVYVANWKSKYEAAGIWYEHRLIDDMVAYALKSDGGYVWACKNYDGDVQSDFLAQGFGSLGLMTSVLVCPDGKTIEAEAAHGTVTRHFRVHQKGGETSTNSIASIFAWSRGLAHRAKLDENPRLLDFTEKLEAACIGVVESGKMTKDLALIIHGPKLAREHYLNTEEFIDAVAAELRARLSA

SEQ ID NO: 736 - protein, 443 aa, Cynodon Dactylon
PTPFHRRRRLPTRLAARPFPISEASCAVTAAMAFEKIKVANPIVEMDGDEMTRVFWKSIKDKLIFPFLDLDIKYYDLGILHRDATDDKVTVEAAEATLKYNVAIKCATITPDETRVKEFNLKHMWRSPNGTIRNIINGTVFREPIICKNVPRLVPGWTKPICIGRHAFGDQYRATDAVLKGPGKLKLVFEGKEEQIDLEVFNFTGAGGVALSMYNTDESVRAFAAASMTMAYEKKWPLYLSTKNTILKKYDGRFKDIFQEVYEADWKSKFEAAGIWYEHRLIDDMVAYALKSEGGYVWACKNYDGDVQSDFLAQGFGSLGLMTSVLVCPDGKTIEAEAAHGTVTRHFRVHQKGGETSTNSIASIFAWTRGLAHRAKLDDNARLLDFAQKLEAACVGTVESGKMTKDLALLVHGSSKVTRSDYLNTEEFIDAVAAELQSRLAAN

SEQ ID NO: 737 - protein, 446 aa, Cynodon Dactylon
RLASPLARLPLPAARVFRGVSLRCYAAAAAVAEQHRIKVDNPIVEMDGDEMTRVIWKMIKDKLILPYLDVDLKYYDLGILNRDATDDRVTVESAEATREYNVAVKCATITPDETRVKEFNLKSMWRSPNGTIRNILNGTVFREPILCKNIPRILSGWKHPICIGRHAFGDQYRATDMIIDGPGKLKMVFVPDGGAEPVELDVYDFKGPGVALSMYNVDESIRAFAESSMAMAFSKKWPLYLSTKNTILKTYDGRFKDIFQEVYEENWRGKFEENSIWYEHRLIDDMVAYAVKSEGGYVWACKNYDGDVQSDFLAQGFGSLGLMTSVLLSSDGKTLESEAAHGTVMRHFRLHQKGQETSTNSIASIFAWTRGLEHRAKLDKNERLLDFTRKLESACVETVESGKMTKDLALLIYGPKVTREFYLNTEEFIDAVAHQLREKIQIPAAV

SEQ ID NO: 738 - protein, 423 aa, Cynodon Dactylon
SPTQSRPAMAFNKIKVANPVVEMDGDEMTRVFWKSIKDKLIFPFVDLDIKYFDLGLPHRDATDDKVTVEAAEATLKYNVAIKCATITPDEARVKEFNLKSMWRSPNGTIRNILNGTVFREPIICQNIPRLVPGWTKPICIGRHAFGDQYRATDAVIKGPGKLKLVYEGKEEQVELEVFNFTGAGGVALAMYNTDESIRSFAEASMATAYEKKWPLYLSTKNTILKKYDGRFKDIFQEVYEAEWRSKYEAAGIWYEHRLIDDMVAYALKSEGGYVWACKNYDGDVQSDFLAQGFGSLGLMTSVLVCPDGKTMEAEAAHGTVTRHYRVHQKGGETSTNSIASIFAWTRGLAHRAKLDDNARLLDFTQKLEAACIGAVESGKMTKDLALLVHGSSNVTRSHYLNTEEFIDAVAEELRSRLGANSNL

SEQ ID NO: 739 - protein, 396 aa, Cynodon Dactylon
GDEMTRVFWKSIKDKLIFPFLDLDIKYYDLGILHRDATDDKVTVEAAEATLKYNVAIKCATITPDETRVKEFNLKHMWRSPNGTIRNIINGTVFREPIICKNVPRLVPGWTKPICIGRHAFGDQYRATDAVLKGPGKLKLVFEGKEEQIDLEVFNFTGAGGVALSMYNTDESVRAFAAASMTMAYEKKWPLYLSTKNTILKKYDGRFKDIFQEVYEADWKSKFEAAGIWYEHRLIDDMVAYALKSEGGYVWACKNYDGDVQSDFLAQGFGSLGLMTSVLVCPDGKTIEAEAAHGTVTRHFRVHQKGGETSTNSIASIFAWTRGLAHRAKLDDNARLLDFAQKLEAACVGTVESGKMTKDLALLVHGSSKVTRSDYLNTEEFIDAVAAELQSRLAAN

SEQ ID NO: 740 - protein, 441 aa, Fraxinus Excelsior
YSVMIRVLQTAMAGALNLSSSYSAFKNPSLVSISNPKLFNGVLFKTRLCFSTRISNASIRCFTSNAIDKVRVQNPIVEMDGDEMTRAIWKMIKDKLIFPYLELDVKYFDLGILNRDATDDKVTVESAEATLKYNVAIKCATITPDETRVKEFGLKAMWRSPNGTIRNILNGTVFREPILCSNIPRIVPGWNKPICIGRHAFGDQYRATDAIIKGPGKLKMVFVPENGEGPMELDVYDFKGPGVALAMYNVDQSIRAFAESSMAMAFAKKWPLYLSTKNTILKKYDGRFKDIFQEVYEEKWKEQFEEHSIWYEHRLIDDMVAYAVKSDGGYVWACKNYDGDVQSDLLAQGFGSLGMMTSVLLSGDGKTLEAEAAHGTVTRHYRLYQKGQETSTNSIASIFAWTRGLEHRAKLDGNEKLLDFSHKLEAACIETVESGKMTKDL

SEQ ID NO: 741 - protein, 429 aa, Fraxinus Excelsior
NFFHREKRSRFSQMDLEKIKVDNPIVEMDGDEMTRVIWKSIKEKLILPFLELDIKYFDLGLPHREATNDKVTIESAEATLKYNVAIKCATITPDEARVKEFSLKHMWKSPNGTIRNILNGTVFREPIMCKNVPRLVPGWTKPICIGRHAFGDQYRATDLVIQGAGKLKMVFVPNSGDGSTELEVYNFTGSGGVALSMYNTDESIRAFAEASMNTAFQKRWPLYLSTKNTILKKYDGRFKDIFQEVYEREWKSKFESAGIWYEHRLIDDMVAYALKSEGGYVWACKNYDGDVQSDFLAQGFGSLGLMTSVLVCPDGKTIEAEAAHGTVTRHYRVHEKGGETSTNSIASIFAWSRGLAHRAKLDNNARLLDYTKKLEAACIASVESGKMTKDLAILIHGPKVTRSRYLNTEEFIEAVAEELKARLPKKAKL

SEQ ID NO: 742 - protein, 415 aa, Fraxinus Excelsior
REKMAFEKIKVANPIVEMDGDEMTRVIWQFIKDKLILPFVELDIKYYDLGLPHRDATDDKVTIESAEAALKYNVAIKCATITPDEARVKEFGLKQMWKSPNGTIRNILNGTVFREPILCKNVPRLVPGWTKPICIGRHAYGDQYRATDTVIKGAGKLKLVFVPEGKDEKTEIEVFNFTGEGGVALSMYNTDESIRSFAEASMNTAYQKKWPLYLSTKNTILKKYDGRFKDIFQEVYELNWKSKFEEAGIWYEHRLIDDMVAYALKSEGGYVWACKNYDGDVQSDFLAQGFGSLGLMSSVLVCPDGKTIEAEAAHGTVTRHYRVHQKGGETSTNSIASIFAWTRGLAHRAKLDDNAKLLDFTEKLEAACIGVVESGKMTKDLALIIHGSKLGRDKYLNTEEFIDSVANELKAKLSC

SEQ ID NO: 743 - protein, 389 aa, Lollium Perenne
KWIKDKLIFPFLDLDIKYYDLGLPNRDATGDKVTIESAEATLKYNVAIKCATVTPDEGRVKEFNLKAMWRSPNGTIRNILNGTVFREPIICKNVPRLVPGWTKPICIGRHAFGDQYRATDVIIRGPGKLKLVFDGVEEQIELDVFNFNGAGGVALSMYNTDESIRAFAESSMNVAYQKRWPLYLSTKNTILKKYDGRFKDIFQENYEKNWRGKFEKAGIWYEHRLIDDMVAYALKSEGGYVWACKNYDGDVQSDLIAQGFGSLGLMTSVLVCPDGRTVEAEAAHGTVTRHYRVHQKGGETSTNSIASIFAWSTGLAHRAKLDDNKRLLDFTQKLEAACVGTVESGKMTKDLALLIHGPTVSRDKYLNTVEFIDAVADELKTSLSVKSKL

SEQ ID NO: 744 - protein, 450 aa, Lollium Perenne
LNALAKLVTPFSLLPVPPSPAPPAPFPISQASSSAVAAMAFEKIKVANPIVEMDGDEMTRVFWQSIKDKLIFPFLDLDIKYYDLGVLHRDATDDKVTVEAAEATLKYNVAIKCATITPDEDRVKEFNLKQMWRSPNGTIRNIINGTVFREPIICKNVPKLVPGWTKPICIGRHAFGDQYRATDAVLKGPGKLRLVFEGKDETVDLEVFNFTGAGGVALAMYNTDESIQGFAAASMAIAYEKKWPLYLSTKNTILKKYDGRFKDIFQAVYEADWKSKYEAAGIWYEHRLIDDMVAYALKSEGGYVWACKNYDGDVQSDFLAQGFGSLGLMTSVLMCPDGKTIEAEAAHGTVTRHFRVHQKGGETSTNSIASIFAWTRGLAHRAKLDDNARLHDFTLKLEEACVGTVESGKMTKDLALLVHGSSKVTRGDYLNTEEFIDAVAAELKSRLAAN

SEQ ID NO: 745 - protein, 415 aa, Olea Europaea
RRKMAFEKIKVANPIVEMDGDEMTRVIWQFIKDKLIFPFVELDIKYYDLGLPHRDATDDKVTIESAEATLKYNVAIKCATITPDEARVKEFGLKQMWKSPNGTIRNILNGTVFREPILCKNVPRLVPGWTKPICIGRHAFGDQYRATDTVIKGPGKLKLVFVPEGKDEKTEIEVFNFTGEGGVALSMYNTDESIRSFAEASMNTAYQKKWPLYLSTKNTILKKYDGRFKDIFQEVYESNWKSKFEEAGIWYEHRLIDDMVAYALKSEGEYVWACKNYDGDVQSDFLAQGFGSLGLMTSVLVCPDGKTIEAEAAHGTVTRHYRVHQKGGETSTNSIASIFAWTRGLAHRAKLDDNDKLLDFTEKLEAACIGVVESGKMTKDLALIIHGSKLGRDKYLNTEEFIDAVADELKAKLSC

SEQ ID NO: 746 - protein, 87 aa, Olea Europaea
KTELEVYNFTGAGGVAIAMYNTDESIRAFAEASMNTAYQKKWPLYLSTKNTILKKYDGRFKDIFQEVYEANWKSKYEAAGISYAVFC

SEQ ID NO: 747 - protein, 39 aa, Plantago Lanceolata
LAILLHGPKVQRAQYLNTEEFIDAVAQELRDRLPKRAKL

SEQ ID NO: 748 - protein, 494 aa, Plantago Lanceolata
LVSLTVTVTPLLELRFRFCFLKFANKKPFLTNSVFFCCLYISINSFTAEIPIPISLTISIHPSSTLFTLLVTTQHKQTKPNPMAFEKIKVANPIVEMDGDEMTRVIWTFIKDKLIFPFVELDIKYFDLGLPHRDATDDKVTVESAEATLKYNVAIKCATITPDEARVKEFGLKSMWRSPNGTIRNILNGTVFREPILCKNVPRLVPGWTKPICIGRHAFGDQYRATDAVIKGPGKLKMVFVPEGKDESTEFEVYNFTGEGGVALAMYNTDESIRSFADASMNVAFEKKWPLYLSTKNTILKKYDGRFKDIFQEVYEASWKSKFEEAGIWYEHRLIDDMVAYALKSEGGYVWACKNYDGDVQSDFLAQGFGSLGLMTSVLVCPDGKTIEAEAAHGTVTRHFRVHQKGGETSTNSIASIFAWTRGLAHRAKLDDNAKLLEFTEKLEAACIGVVEAGKMTKDLALILHGPKLSRDTYLNTEEFLDAVAEELKAKLSC

SEQ ID NO: 749 - protein, 436 aa, Poa Pratensis
RRPPHLPRLAAFPISEASIAAADAMAFEKIKVANPIVEMDGDEMTRVFWQSIKEKLIFPFLDLDIKYYDLGVLHRDATDDKVTVEAAEATLKYNVAIKCATITPDEDRVKEFNLKQMWRSPNGTIRNIINGTVFREPIICKNVPKLVPGWTKPICIGRHAFGDQYRATDAVLKGPGKLRLVFEGKDETVDLEVFNFTGAGGVALAMYNTDESIQGFAEASMAIAYEKKWPLYLSTKNTILKKYDGRFKDIFQAVYEADWKSKYEAAGIWYEHRLIDDMVAYALKSEGGYVWACKNYDGDVQSDFLAQGFGSLGLMTSVLMCPDGKTIEAEAAHGTVTRHFRVHQKGGETSTNSIASIFAWTRGLAHRAKLDDNARLLDFTQKLEDACVGTVESGKMTKDLALLVHGSSKVTRGDYLNTEEFIDAVAAELQSRLAAN

SEQ ID NO: 750 - protein, 457 aa, Quercus Alba
TAKQRLTIHQYKKSPQHLLISPSTIIARHQPLFVSLTHSRSLFKKMAFEKIKVANPIVEMDGDEMTRVFWKSIKDKLIFPFVDLDIKYFDLGLPYRDATDDKVTIESAEATLKYNVAIKCATITPDEARVKEFGLKQMWKSPNGTIRNILNGTVFREPIICKNVPRLVPGWTKPICIGRHAFGDQYRATDTVIKGAGKLKLVFVPEGKDEKTELEVYNFTGAGGVAIAMYNTDESIRAFAEASMNTAYQKKWPLYLSTKNTILKKYDGRFKDIFQEVYEANWKSKYEAAGIWYEHRLIDDMVAYAVKSEGGYVWACKNYDGDVQSDFLAQGFGSLGLMTSVLVCPDGKTIEAEAAHGTVTRHYRVHQKGGETSTNSIASIFAWSRGLSHRAKLDDNARLLDFTEKLEAACVGTVESGKMTKDLALLIHGSKVTREQYLSTEEFIDAVATELKARLSA

SEQ ID NO: 751 - protein, 490 aa, Quercus Alba
RTTALRLSAMSSGAKMLASTSSSSSSFLAVRNPSFSSTSTRLFNGGVLHRGNKNRVSFSSATRFANASLRCYASSAGFDRVQVQNPIVEMDGDEMTRIIWRMIKDKLIFPYLDLDIKYFDLGILNRDATDDRVTVESAEAALKYNVAVKCATITPDETRVKEFGLKSMWRSPNGTIRNILNGTVFREPILCRNIPKIIPGWKKPICIGRHAFGDQYRATDTVIEGPGKLKMVFVPDDGKTPVELDVFNFKGPGIALAMYNVDESIRAFAESSMTLAFAKKWPLYLSTKNTILKKYDGRFKDIFQEVYEEKWKQKFEENSIWYEHRLIDDMVAYVVKSEGGYVWACKNYDGDVLSDLLAQGFGSLGLMSSVLLSSDGKTLEAEAAHGTVTRHFRLHQKGQETSTNSIASIFAWTRGLEHRAKLDENEKLREFVHKLEAACIETVETGKMTKDLAILIHGSKVSREHYLNTEEFIDAVAQNLEAKIQEPVLA

SEQ ID NO: 752 - protein, 490 aa, Quercus Alba
RTTALRLSAMSSGAKMLASTSSSSSSFLAVRNPSFSSTSTRLFNGGVLHRGNKNRVSFSSATRFANASLRCYASSAGFDRVQVQNPIVEMDGDEMTRIIWRMIKDKLIFPYLDLDIKYFDLGILNRDATDDRVTVESAEAALKYNVAVKCATITPDETRVKEFGLKSMWRSPNGTIRNILNGTVFREPILCRNIPKIIPGWKKPICIGRHAFGDQYRATDTVIEGPGKLKMVFVPDDGKTPVELDVFNFKGPGIALAMYNVDESIRAFAESSMTLAFAKKWPLYLSTKNTILKKYDGRFKDIFQEVYEEKWKQKFEENSIWYEHRLIDDMVAYVVKSEGGYVWACKNYDGDVLSDLLAQGFGSLGLMSSVLLSSDGKTLEAEAAHGTVTRHFRLHQKGQETSTNSIASIFAWTRGLEHRAKLDENEKLREFVHKLEAACIETVETGKMTKDLAILIHGSKVSREHYLNTEEFIDAVAQNLEAKIREPVLA

SEQ ID NO: 753 - protein, 96 aa, Quercus Alba
GRHAFGDQYRATDIVIQESGKLKLVFVPNGHNEKKEFEVFNFTGAGGVALSMYNTDESIRAFAEASMNTAYQKKWPLYLSTKNTILKKYDGRFKDI

SEQ ID NO: 754 - protein, 194 aa, Quercus Alba
GRFKDIFQEVYETQWKSKFEAAGIWYEHRLIDDMVAYAMKSEGGYVWACKNYDGDVQSDFLAQGFGSLGMMTSVLVCPDGKTIESEAAHGTVTRHYRVHQKGGETSTNSIASIFAWTRGLAHRAKLDSNARLLDFTEKLEAACVGTVESGKMTKDLALLIHGPKVTRSQYLNTEEFIDAVAEELRARLSTRAKL

SEQ ID NO: 755 - protein, 396 aa, Quercus Alba
GDEMTRVFWKSIKDKLIFPFVDLDIKYFDLGLPYRDATDDKVTIESAEATLKYNVAIKCATITPDEARVKEFGLKQMWKSPNGTIRNILNGTVFREPIICKNVPRLVPGWTKPICIGRHAFGDQYRATDTVIKGAGKLKLVFVPEGKDEKTELEVYNFTGAGGVAIAMYNTDESIRAFAEASMNTAYQKKWPLYLSTKNTILKKYDGRFKDIFQEVYEANWKSKYEAAGIWYEHRLIDDMVAYAVKSEGGYVWACKNYDGDVQSDFLAQGFGSLGLMTSVLVCPDGKTIEAEAAHGTVTRHYRVHQKGGETSTNSIASIFAWSRGLSHRAKLDDNARLLDFTEKLEAACVGTVESGKMTKDLALLIHGSKVTREQYLSTEEFIDAVATELKARLSA

SEQ ID NO: 756 - protein, 251 aa, Ambrosia Artemisiifolia
RGHNVFWDDPASQMAWVNKLSKEQLKEAMDKRVKSVVNKYKGQVIHWDVNNENVHFNFFETKFGPDASTKIFQQVHQIDPDVILFLNDFNTLEQPGDTNATPDKYLKKFHEIRAGNPNAKMAIGLESHFDVPNIPHMRAVLDKMATAGVPIWLTEVDVAGTDPNQAHYLEQILREGYSHPAVQGIVMWASWTPKGCYRMCLTNNQFQNLPVGDTVDKLIKEWKTHASGTTAADGSFQTTLAHGDYKVTVTH

SEQ ID NO: 757 - protein, 218 aa, Ambrosia Artemisiifolia
EVVAKERKKKVKITVECGGKPLPNAELSVQWVAKGFPLGNAMTKEILDMPEYEEWFTKRFKWATMENAMKWYSTEYNEGQEGFEVADKMLALAEKHNISVRGHNVFWDDQSHQMPWVEKLSVGKLKAAVAKHLKAVVSRYAGKVIHWDVVNENLHFSFFEDKLGKDASGEIFKEVAKLDSKPILFMNEFNTIEEPCDLAPLPTKYLAKLKQIQSYPGN

SEQ ID NO: 758 - protein, 136 aa, Ambrosia Psilostachya
GYNERLSIGLEGHFQNVNIPYMRSAIDKVASSGLPIWITEVDVQTGPNQAMFFDQVLREAHAHPSIHGIVVWSAWSPQGCYRMCLTDNNFNNLPTGDVVDRIIREFFSVELTATTDVNGFYETSLIHGDYEVSFAH

SEQ ID NO: 759 - protein, 364 aa, Betula Verrucosa
VRIQAVDGQGNPISNTTVLLEQKKLSFPFGTAINKNILTNSDYQKWFTSRAFTVTVFENEMKWYANEPSQGEEEYDDADALLEFANQHGLDVRGHTVLWEDPQMIQGWVSSLSSSDLAEAVKKRINSIMSKYKGQVIAWDVVNENMHHSFFEDRLGGDASASFYNRAQKIDGSTTLFLNEYNTIEDNRDGSSNPHAYLQKLEEIQGFPGNSDLKMGIGLQGHFSYPPDLSYVRASIDTLASTGLPIWITELDVKSSVGDEQTQAEYLEQILRELHAHPNVDGIMLWTAWLPSGCYRMCLTDNNFDNLATGDVVDKLMEEWGSKAFAGKTDANGYFEASLFHGEYEVKISHPTEPSSDLSQSFVV

SEQ ID NO: 760 - protein, 383 aa, Cynodon Dactylon
FSFDEWDAHTRRSGDKTRRRTVRLVAKGADAKPMANANVSIELLRLGFPFGNTMTAEILSLPAYEKWFTSRFTHATFENEMKWYSTEWSQNQENYDVPDRMLKMAQKYGIKVRGHNVFWDDQNSQMRWVKPLNLDQLKSAMQKRLKNVVTRYAGKVIHWDVVNENLHFNFFESKLGSSASAQIYNQVGQIDRNAILFMNEFNVLEQPGDPNAVPSKYIAKMNQIRSYPGNSGLKMGVGLESHFSTPNIPYMRSTLDTLAKLKLPMWLTEVDVVKNPNQVKYLEQVLREGYAHPNVDGIIMWAAWHAKGCYVMCLTDNNFKNLPVGDLVDKLITEWKTHRTVATTDENGAVVLDLPLGEYKFTVHHPSLSGTTVDLMTVDGASS

SEQ ID NO: 761 - protein, 398 aa, Quercus Alba
IWVDSISLQPFTQEQWKSHQDQSIEKARKRKVRIHVVDEQGNPLPNASISIIQKKVSFPFGTAINKNILTNKAYQNWFSSRFTVTVFEDEMKWYTTEPSPGQEDYTAADALFQFAKKHSIPVRGHNVLWDDPSKVQGWVSSLSPTDLAVAVKKRINSVMSRYKGQVIAWDVVNENLHFSVFEDKLGSTASATFFNAAQEIDGTTTLFMNDYNIIEDSRDRSSTPDKYIQKLKQIQRFPRNNNLKQGIGLESHFSIAPDLAYMRSSIDTLASTGLPVWITELDIASALGQQVQARYLEQVLRELYAHPKINGIIMWSAWKPGGCYQMCLTDNSFNNLPTGNVVDKLLREWRSSLKGTADGDGFFEASLSHGDYELKISHPNVTSSSLAQSQRFEVSSAD

SEQ ID NO: 762 - protein, 563 aa, Ambrosia Artemisiifolia
PLEVQVYAEHAYQTTVARFSPNGEWVASADVSGMVRIWGTHNGFVLKNEFRVLSGRIDDLQWSGDGMRIVASGDGKGKSFVRAFMWDSGSNVGEFDGHSRRVLSCAFKPTRPFRIVTCGEDFLINFYEGPPFKFKLSHRDHSNFVNCVRFSPDGSKFITVSSDKQGLLYDGKTAEKKGELSSEDGHKGSIYAVSWSPDSKQVLTVSADKTAKIWTISEDFNGTVAKTLCCPGSGGVEDMLVGCLWQNDYIVTVSLGGTIYLYSASDLDKDPTILCGHMKNITSLVVLKTNPETILSSSYDGLISKWIRGVGYNGKLERKDKNQIKCLTAVDEEIISSGFDNKIWRIPLTGDECGDANIVDIGSQPIDLSVAIHKHELALISIEKGVVLLNGTQVLSTIDLGFTVSACAIAPDGTEAIVGGQDGKLHIYSVNGDSLTEEAVLEKHRGAITVIHYSPDVSMFASADANREAVVWDRVTREVKLKNMLYHTARINSLAWSPDNTMVATGSLDTCVIVYEISKPASSRITIKGANLGGVYAVSFVDDNTVVSSGEDACIRLWQISPQ

SEQ ID NO: 763 - protein, 145 aa, Ambrosia Psilostachya
MANLVETYACIPSTERGRGILISGDPKTNAFLYCNGRSVIIRYLDRPLEVQVYAEHAYQTTVARFSPNGEWVASADVSGMVRIWGTHNGFVLKNEFRVLSGRIDDLQWSGDGMRIVASGDGKGKSFVRAFMWDSGSNVGEFDGHS

SEQ ID NO: 764 - protein, 470 aa, Ambrosia Psilostachya
EFDGHSRRVLSCAFKPTRPFRIVTCGEDFLINFYEGPPFKFKLSHRDHSNFVNCVRFSPDGSKFITVSSDKQGLLYDGKTAEKKGELSSEDGHKGSIYAVSWSPDSKQVLTVSADKTAKIWTISEDFNGTVAKTLCCPGSGGVEDMLVGCLWQNDYIVTVSLGGTIYLYSASDLDKDPTILCGHMKNITSLVVLKTNPETILSSSYDGLISKWIRGVGYNGKLERKDKNQIKCLTAVDEEIISSGFDNKIWRIPLTGDECGDANIVDIGSQPIDLSVAIHKHELALISIEKGVVLLNGTQVLSTIDLGFTVSACAIAPDGTEAIVGGQDGKLHIYSVNGDSLTEEAVLEKHRGAITVIHYSPDVSMFASADANREAVVWDRVTREVKLKNMLYHTARINSLAWSPDNTMVATGSLDTCVIVYEISKPASSRITIKGANLGGVYAVSFVDDNTVVSSGEDACIRLWQISPQ

SEQ ID NO: 765 - protein, 609 aa, Betula Verrucosa
MPQLAETYASVPTTERGRGILISGHPKSNTVLYTNGRSVIMINLDNPLDVSVYAEHAYPATVARYSPNGEWIASADVSGTVRIWGTRNEFVLKKEFKVLSGRIDDLQWSADGQRIVACGDGKGKSLVRAFMWDSGTNVGEFDGHSRRVLSCAFKPTRPFRIVTCGEDFLVNFYEGPPFKFKQSHRDHSNFANCVRYSPDGNKFISVSSDKKGIIYDGKSGEKIGELSSEDGHKGSIYAVSWSPDGKQVFTASADKSAKVWEISEDGTGKVKKTLTSPVSGGVDDMLVGCLWQNDHLVTVSLGGTISLFSVTDLDKAPLLLSGHMKNVNSLAVLKSDPKVILSSSYDGLIIKWIQGIGYSGRLQRKENSQIKCFAAVEEEIVTSGFDNKIWRVSVHGDQCGDADSVDIGTQPKDLSLALLSPELALVSTDSGVVLLRGTKVLSTINLGFSVTASAIAPDGSEAIVGGQDGKLHIYSITGDTLKEEAVLEKHRGAVSVIRYSPDVSMFASGDVNREAVVWDRVSREVKLKNMLYHTARINCLAWSPDSSIVATGSLDTCVIIYEVGKPASSRSTIKGAHLGGVYGLAFTDQYSVVSSGEDACVRVWRLTPE

SEQ ID NO: 766 - protein, 610 aa, Cynodon Dactylon
MAQLAETYACSPATERGRGILLAGDPKTDTIAYCTGRSVIIRRLDAPLDAWAYQDHAYPTTVARFSPNGEWVASADASGCVRVWGRYGDRALKAEFRPLSGRVDDLRWSPDGLRIVVSGDGKGKSFVRAFVWDSGSTVGEFDGHSKRVLSCDFKPTRPFRIVTCGEDFLANFYEGPPFKFKHSIRDHSNFVNCIRYSPDGSKFITVSSDKKGLIYDGKTGEKIGELSSEGSHTGSIYAVSWSPDSKQVLTVSADKTAKVWDIMEDATGKLNRTLVCTGIGGVDDMLVGCLWQNDHLVTVSLGGTFNVFSASNPDQEPVTFAGHLKTISSLVLFPQSNPRTILSTSYDGVIMRWIQGVGYGGRLMRKNNTQIKCFAAVEEELVTSGYDNKIFRIPLNGDQCGDAESVDVGGQPNAVNLAIQKPEFALVTTDSGIILLHNSKVISTTKVDYTITSSSVSPDGSEAVVGAQDGKLRIYSISGDTLTEEAVLEKHRGAITSIHYSPDVSMFASADANREAVVWDRATREVKLKNMLYHTARINCLAWSPDSRLVATGSLDTCAIVYEIDKPAASRITIKGAHLGGVRGLTFVDNDTLVTAGEDACIRDWKLVQQ

SEQ ID NO: 767 - protein, 609 aa, Quercus Alba
MSQLAETYACVPTTERGRGILISGNPKSNTITYTNGRSVIMINLDNPLDVSVYAEHAYPATVARYSPNGEWIASADVSGTVRIWGTRNEFVLKKEFKVLSGRIDDLQWSPDGMRIVACGDGKGKSLVRAFMWDSGTNVGEFDGHSRRVLSCAFKPTRPFRIVTCGEDFLVNFYEGPPFKFKLSHRDHSNFVNCVRFSPDGSKFISVSSDKKGLIYDAKTAEKMGELSSEDGHKGSIYAVSWSPDGKQVLTASADKSAKVWEISEDGNGKVKKTLASPGSGGVDDMLVGCLWQNDHLVTVSLGGTISLFSATDLDKAPLLLSGHMKNVTSLAVLKSDPKMIWSTSYDGLIIKWIQGIGYSGRLQRKENSQIKCFAAVEEEIVTSGFDNKIWRISVHGDQCGDADSVDIGSQPKDLNLALLSPDLALVSTDSGVVLLRGAKIVSTISLGFTVTASAISPDGTEAIVGGQDGKLHIYSVTGDTLNEEAVLEKHRGAISVICYSPDVSMFASGDVNREAIVWDHDSREVKLKNMLYHTARINCLAWSPDSSMIATGSLDTCVIIYEVDKPASSRLTIKGAHLGGVYGLAFTDQYSVVSSGEDACVRVWKLTPQ

SEQ ID NO: 768 - protein, 478 aa, Ambrosia Artemisiifolia; identical to SEQ ID NO: 691

SEQ ID NO: 769 - protein, 117 aa, Ambrosia Artemisiifolia
AANAVEAIPYFSDGLKGVARSMPTSAALDVVAEALNLKFFEVPTGWKFFGNLMDAGLCSVCGEESFGTGSDHVREKDGIWAVLAWLSILAQKNKEKLNGEKLVTVEDIVRQHWATYG

SEQ ID NO: 770 - protein, 376 aa, Ambrosia Psilostachya; identical to SEQ ID NO: 692

SEQ ID NO: 771 - protein, 96 aa, Ambrosia Psilostachya
GAFILTASHNPGGPNEDFGIKYNMGNGGPAPEGITDKIFENTKTIKEYFIAEGLPDVDISAIGVSNFSGPGGQFDVDVFDSASDYVKLMKSIFDFQ

SEQ ID NO: 772 - protein, 583 aa, Betula Verrucosa; identical to SEQ ID NO: 693

SEQ ID NO: 773 - protein, 583 aa, Cynodon Dactylon; identical to SEQ ID NO: 694

SEQ ID NO: 774 - protein, 582 aa, Quercus Alba; identical to SEQ ID NO: 695

SEQ ID NO: 775 - protein, 87 aa, Ambrosia Artemisiifolia
QLQLLLKGASERGAKRIRVHVLTDGRDVVDGSSVGFAETLEKDLAELRGKGIDAQVASGGGRMYVTMDRYENDWEVVKRGWDAQVLG

SEQ ID NO: 776 - protein, 524 aa, Ambrosia Artemisiifolia
MGSTGFSWKLADHPKLPKGKLLAMIVLDGWGEASPDKFNCIHVADTPTMDSLKNGAPDKWRLVRAHGTAVGLPTEDDMGNSEVGHNALGAGRIYAQGAKLVDLALASGKIYEDEGFNYIKESFATNTLHLIGLMSDGGVHSRLDQLQLLLKGASQHGAKRIRVHVLTDGRDVLDGSSVGFAEILEAELSDLRSKGIDAQVASGGGRMYVTMDRYENDWEVVKRGWDAQVLGEAPHKFKNVVEAIKTLREAPGANDQYLPPFVIVDDSGKSVGPIVDGDAVVTFNFRADRMTMLAQALEYENFDKFDRVRVPKIRYAGMLQYDGELKLPSHYLVSPPLIERTSGEYLVHNGVRTFACSETVKFGHVTFFWNGNRSGYFNSELEEYVEIPSDSGITFNVQPKMKALEIGEKARDAILSGRFDQVRVNIPNGDMVGHTGDVEATVVACKAADEAVKMIIDAVEQVGGIYVVTADHGNAEDMVKRNKKGEPILKDGEVQILTSHTLQPVPIAIGGPGLAAGVKFRKDV

SEQ ID NO: 777 - protein, 258 aa, Ambrosia Psilostachya
EKFDKFDRVRFPKIRYAGMLQYDGELKLPSHYLVSPPLIERTSGEYLVHNGIRTFACSETVKFGHVTFFWNGNRSGYFNKELEEYVEIPSDSGITFNVQPKMKALEIGEKARDAILSRKFDQVRVNIPNGDMVGHTGDIEATIVACKAADQAVKMILDAIEQVGGIYLVTADHGNAEDMVKRNKKGEPLLKDGEVQILTSHTLQPVPIAIGGPGLAAGVKFRKDVPSGGLANVAATVMNLHGFVAPDDYETTLIEVVD

SEQ ID NO: 778 - protein, 414 aa, Ambrosia Psilostachya
DQLQLLLRGASQHGAKRIRVHVLTDGRDVLDGSSVGFAETLEAELSDLRSKGIDAQVASGGGRMYVTMDRYENDWEVVKRGWDAQVLGEAPHKFKNVVEAIKTLREAPGANDQYLPPFVIVDDSGKAVGPVVDGDAVVTFNFRADRMTMLAQALEYEKFDKFDRVRVPKIRYAGMLQYDGELKLPSHYLVSPPLIDRTSGEYLVNNGVRTFACSETVKFGHVTFFWNGNRSGYFNSELEEYVEIPSDSGITFNVQPKMKALEIGEKARDAILSGKFDQVRVNIPNGDMVGHTGDVEATVVACKAADEAVKMILDAVEQVGGIYVVTADHGNAEDMVKRNKKGEPLLKDGEVQILTSHTLQPVPIAIGGPGLAAGVKFRKDVPSGGLANVAATVMNLHGFVAPDDYETTLIEVVD

SEQ ID NO: 779 - protein, 558 aa, Betula Verrucosa
MGTSGFSWKLPEHPKLPKGKTVAVVVLDGWGEAKPDQYNCIHVAETPTMDSLKQGAPEKWRLVRAHGKAVGLPTEDDMGNSEVGHNALGAGRIFAQGAKLVDSALASGKIYEGEGFKYIKECFENGILHLIGLLSDGGVHSRLDQLQLLLKGASERGAKRIRVHILTDGRDVLDGSSVGFVETLENDLAKLREKGVDAQIASGGGRMYVTMDRYENDWEVIKRGWDAHVLGEAPYKFKSAVEAVKKLREELKVSDQYLPPFVIVDDNGKPVGPIVDGDAVVTINFRADRMVMIAKALEYENFDKIDRVRFPKIRYAGMLQYDGELKLPSHYLVEPPEIERTSGEYLVHNGVRTFACSETVKFGHVTFFWNGNRSGYFNSELEEYVEIPSDSGITFNVQPKMKALEIAEKTRDAILSGKFDQVRVNLPNGDMVGHTGDIEATVVACKAADEAVKMILDAIEQVGGIYVVTADHGNAEDMVKRNKSGQPLLDKNGNLQVLTSHTLQPVPIAIGGPGLASGVRFRKDLPDGGLANVAATVINLHGFEAPSDYEPTLIELVD

SEQ ID NO: 780 - protein, 557 aa, Cynodon Dactylon
SAMATAWTLPDHPKLPKGKTVAVVVLDGWGEANPDQYNCIHVAQTPVMDSLKNGAPERWRLVKAHGTAVGLPSDDDMGNSEVGHNALGAGRIFAQGAKLVDSALASGKIYDGEGFNYIKESFENGTLHLIGLLSDGGVHSRLDQVQLLLKGASERGAKRIRVHILTDGRDVLDGSSVGFVETLENDLSELREKGIDAQIASGGGRMNVTMDRYENDWGVVKRGWDAQVLGEAPHKFKSAVEAVKTLRAVPDANDQYLPPFVIVDESGKAVGPIVDGDAVVTFNFRADRMVMLAKALEYADFDKFDRVRVPKIRYAGMLQYDGELLLPKRYLVSPPEIDRTSGEYLVKNGVRTFACSETVKFGHVTFFWNGNRSGYFDESKEEYVEVPSDSGITFNVKPKMKAVEIAEKARDAILSGKFDQIRVNLPNGDMVGHTGDIEATVVACKAADEAVKIILDAVEQVGGIYLVTADHGNAEDMVKRNKAGKPLLDKSGAIQILTSHTLQPVPVAIGGPGLHPGVKFRSDIETPGLANVAATVMNLHGFEAPADYEPTLIEVAD

SEQ ID NO: 781 - protein, 555 aa, Quercus Alba
MGSSWKLADHPKLPKGKTVAVVVLDGWGEAKPDQYNCIHVAETPTMDSLKKGDPDKWRLVKAHGSAVGLPTEDDMGNSEVGHNALGAGRIFAQGAKLVDLALESGKIYDGEGFKYISECFEKGTLHLIGLLSDGGVHSRLDQLLLLLKGSSERGAKRIRVHILTDGRDVLDGSSVGFVETLENYLAELRGKGVDAQIASGGGRMYVTMDRYENDWEVVKRGWDAQVLGEAPFKFRNAVEGVKQLRQAPKASDQYLPPFVIADESGKPVGPIVDGDAVVTINFRADRMVMVAKAFEYEDFDKFDRVRVPKIRYAGMLQYDGELKLPSHYLVSPPEIDRTSGEYLVHNGIRTFACSETVKFGHVTFFWNGNRSGYFNEELEEYVEIPSDSGITFNVQPKMKALEIGEKVRDAILSGKFDQVRVNIPNGDMVGHTGDIEATVVACKAADEAVKMILDAIEQVGGIYVVTADHGNAEDMVKRNKTGQPQLDKGGKIQILTSHTCQPVPIAIGGPGLAPGCRFRRDIPTGGLANVAATVMNLHGFEAPSDYEPTLVEVVD

SEQ ID NO: 782 - protein, 445 aa, Ambrosia Artemisiifolia
MDEEYDVIVLGTGLKECILSGLLSVDGLKVLHMDRNDYYGGESTSLNLSQLWKRFKGGEAPPEELGASKDYNVDMVPKYMMANGTLVRVLIHTSVTKYLNFKAVDGSYVFNKGKVHKVPATDVEALKSPLMGLFEKRRARKFFIYIQDYDDNDPKSHEGMDVTKVPAKDLISKKYGLDDHTVDFIGHALALHRDDDYLEQPAIDLIKRVKLYAESLARFAGGSPYIYPLYGLGELPQAFARLSAVYGGTYMLNKPECKVEFEDGKVVGVTSEGETAKCKKVVCDPSYLPDKVQKVGKVARAICIMSHPIPNTNDAHSAQVILPQKQLGRKSDMYLFCCSYSHNVAPKGKFIAFVTTEAETDDPETELKPGIDLLGPVDQIFFDTYDRYEPVNQGEEDNCYISASYDATTHFESTVQDVIAMYSRITGKTLDLSVDLSAASAAGDE

SEQ ID NO: 783 - protein, 445 aa, Ambrosia Psilostachya; identical to SEQ ID NO: 782

SEQ ID NO: 784 - protein, 436 aa, Betula Verrucosa
MDEEYDVIVLGTGLKECILSGLLSVDGLKVLHMDRNDYYGGDSSSLNLTQLWKRFRGNDTPPEKLGSSREYNVDMIPKFMMANGKLVRVLIHTDVTKYLHFKAVDGSFVYNKGKIYKVPASDVEALTSSLMGLFEKRRARKFFLYVQDYEDNDPKSHEGLDLNKVTARELITKYGLEDDTIGIIGHALALQIDDSYLDQPAMDFVKRMKLYAESLARFQGNSPYIYPLYGLGELPQAFARLSAVYGGTYMLNKPECKVEFGNDGKAFGVTSEGETAKCKKVVCDPSYLPDKVQKVGKVARAICIMSHPIPDTNDSHSVQVILPQKQLGRKSDMYLFCCSYAHNVAAKGKYIAFVSTEAETDKPEVELKAGIDLLGPVEEIFYDTYDRFVPTNKHEVDSCFISTSYDATSHFESTVDDVIQLYSKITGKALDLSVDL

SEQ ID NO: 785 - protein, 445 aa, Cynodon Dactylon
MDEEYDVIVLGTGLKECILSGLLSVDGLKVLHMDRNDYYGGESTSLNLTKLWKRFKGNDNPPEHLGISKQYNVDMIPKFMMANGALVRVLIHTSVTKYLNFKAVDGSFVYNNGKIHKVPATDVEALKSNLMGLFEKRRARKFFIYVQDYEEEDPKSHEGLDLHKVTTREVISKYGLEDDTVDFIGHALALHRDDNYLDEPAIHTVKRMKLYAESLARFQSASPYIYPLYGLGELPQAFARLSAVYGGTYMLNKPECKVEFDENGKAYGVTSEGVTAKCKKVVCDPSYLPEKVKKVGKVARAICIMKHPIPHTKDSHSVQIILPKKQLKRKSDMYVFCCSYAHNVAPNGKFIAFVSTEAETDKPEIELKPGIDLLGPVEETFFDIYDRYEPTNNPEEDSCFLTNSYDATTHFETTVQDVLSMYNKITGKELDLSVDLNAASATEQE

SEQ ID NO: 786 - protein, 443 aa, Quercus Alba
MDEEYDVVVLGTGLKECILSGLLSVDGLKVLHMDRNDYYGGESTSLNLIQLWKRFRGNDKPPAHLGSSRDYNVDMIPKFMMANGTLVRVLIHTDVTKYLYFKAVDGSFVYNKGKVHKVPATDMEALKSPLMGIFEKRRARKFFIYVQDYNETDPKTHDGMDLTRVTTRELIAKYGLDDNTVDFIGHALALHRDDRYLDEPALDTVKRMKLYAESLARFQGGSPYIYPLYGLGELPQAFARLSAVYGGTYMLNKPECKVEFNEVGQVLGVTSEGETARCKKVVCDPSYLPNKVRKVGRVARAIAIMSHPIPNTNESHSVQVILPQKQLGRKSDMYLFCCSYSHNVAPKGKFIAFVSTEAETDHPETELKAGIDLLGPVDEIFFDIYDRYEPVNEPTLDNCFISTSYDATTHFESTVLDVLNMYTMITGKVLDLSVDLSAASAAE

SEQ ID NO: 787 - protein, 331 aa, Ambrosia Artemisiifolia
MAKDPIRVLVTGAAGQIGYALVPMIARGIMLGPDQPVILHMLDIPPAAEALNGVKMELVDAAFPLLKGVVATTDAVEACTGVNVAVMVGGFPRKEGMERKDVMSKNVSIYKSQASALEKYAAANCKVLVVANPANTNALILKEFAPSIPEKNITCLTRLDHNRALGQISEKLNVQVSDVKNVIIWGNHSSTQYPDVTHATVTTPSGDKRVPELVNDDEWLKSGFIATVQQRGAAIIKARKLSSALSAASSACDHIRDWVCGTPAGTWVSMGVYSDGSYDVPAGLIYSFPVTCRNGEWTIVQGLSIDEFSRKKLDLTAEELSEEKALAYSCL

SEQ ID NO: 788 - protein, 331 aa, Ambrosia Psilostachya; identical to SEQ ID NO: 787

SEQ ID NO: 789 - protein, 331 aa, Betula Verrucosa
MAKEPVRILVTGAAGQIGYALVPMIARGVVLGPDQPVILHMLDIPPAAEALNGVKMELVDAAFPLLKGVIATTDVVEACTGVNIAIMVGGFPRKEGMERKDVMSKNVSIYKSQASALEKHAAANCKVLVVANPANTNALILKECAPSIPEKNISCLTRLDHNRALGQISERLNVPVCDVKNVIIWGNHSSTQYPDVSHATVKTPSGEKPVPELVADDAWLKGEFITTVQQRGAAIIKARKLSSALSAASSACDHIRDWVLGTPEGTWVSMGVYSDGSYNVPAGLIYSFPVTCRNGEWKIVQGLSIDEFSRKKLDLTAEELSEEKTLAYSCL

SEQ ID NO: 790 - protein, 331 aa, Betula Verrucosa
MAKNPVRVLVTGAAGQIGYAIVPMVARGIMLGPDQPVILHLLDIEPAAEALNGVKMELVDAAFPLLKGVVATTDVVEACKGVNVAVMVGGFPRKEGMERKDVMSKNVSIYKAQASALEEHAAEDCKVLVVANPANTNALILKEFAPSIPEKNISCLTRLDHNRALGQISERLNVHVSDVKNVIIWGNHSSTQYPDVNHATVTTSGAEKPVRELVADDHWLNAEFITTVQQRGAAIIKARKLSSALSAASAACDHIRDWVLGTPKGTWVSMGVYSDGSYGIQPGLIYSFPVTCEKGQWSIVQGLKIDEFSRAKMDATAKELIEEKSLANSCL

SEQ ID NO: 791 - protein, 331 aa, Cynodon Dactylon
MAKEPMRVLVTGAAGQIGYALVPMIARGIMLGADQPVILHMLDIPPAAEALNGVKMELVDAAFPLLKGVVATTDVVEACTGVNVAVMVGGFPRKEGMERKDVMSKNVSIYKAQASALEAHAAPNCKVLVVANPANTNALILKEFAPSIPEKNITCLTRLDHNRALGQISERLNVQVSDVKNVIIWGNHSSTQYPDVNHATVKTPSGEKPVRELVADDEWLNGEFVKTVQQRGAAIIKARKLSSALSAASSACDHIRDWVLGTPEGTYVSMGVYSDGSYGVPAGLIYSYPVTCSGGEWKIVQGLPIDDLSRQKMDATAQELSEEKTLAYSCL

SEQ ID NO: 792 - protein, 331 aa, Quercus Alba
MGKEPVRVLVTGAAGQIGYALVPMIARGVMLGPDQPVILHMLDIPPAAEALNGVKMELVDAAFPLLKGVVATTDVVEGCTGVNIAIMVGGFPRKEGMERKDVMSKNVSIYKSQASALEQHAAANCKVLVVANPANTNALILKEFAPSIPEKNITCLTRLDHNRALGQISERLNVQVSDVKNAIIWGNHSSTQYPDVNHATVKTPSGEKPVRELVADDAWLHGEFIATVQQRGAAIIKARKLSSALSAASSACDHIRDWVLGTPEGTWVSMGVYSDGSYNVPAGLIYSFPVTCRNGEWKIVQGLSIDELSRKKLDLTAEELTEEKALAYSCL

SEQ ID NO: 793 - protein, 299 aa, Ambrosia Artemisiifolia
SQSRSFATAPPPPAVFVDKNTRVICQGITGKNGTFHTEQAIEYGTKMVGGVTPKKGGTEHLGLPVFNTVADAKAETKANASVIYVPPPFAAAAIMEALEAELDLIVCITEGIPQHDMVKVKAALLQQSKTRLIGPNCPGIIKPGECKIGIMPGYIHKPGRIGIVSRSGTLTYEAVYQTTVVGLGQSTCVGIGGDPFNGTNFVDCMEKFIADPQTEGIVLIGEIGGTAEEDAAALIKESGTEKPIVGFIAGLTAPPGRRMGHAGAIVSGGKGTAQDKIKTLKEAGVTVVESPAKIGSAMF

SEQ ID NO: 794 - protein, 312 aa, Ambrosia Psilostachya
TRQYATASSQYAETIKNLRINGDTKVLFQGFTGKQGTFHAQQAIEYGTKVVGGTNPKKAGTEHLGLPVFKNVAEAMKETQASATAIFVPPPVAAASIEEAINAEVPLIVTITEGIPQHDMVRITDMLKTQSKSRMVGPNCPGIIAPGQCKIGIMPGFIHKRGRVGIVSRSGTLTYEAVNQTTQAGLGQSLVVGIGGDPFSGTNFIDCLNVFLKDEETDGIIMIGEIGGTAEEDAADFLKEYNTANKPVVSFIAGISAPPGRRMGHAGAIVSGGKGDANSKITALEAAGVTVERSPAKLGSSLYDQFVKRDLI

SEQ ID NO: 795 - protein, 237 aa, Ambrosia Psilostachya
CQTETKANASVIYVPPPFAAAAIMEALEAELDLIVCITEGIPQHDMVKVKAALLQQSKTRLIGPNCPGIIKPGECKIGIMPGYIHKPGRIGIVSRSGTLTYEAVYQTTVVGLGQSTCVGIGGDPFNGTNFVDCMEKFIADPQTEGIVLIGEIGGTAEEDAAALIKESGTEKPIVGFIAGLTAPPGRRMGHAGAIVSGGKGTAQDKIKTLKEAGVTVVESPAKIGSAMFEVFKQRGLV

SEQ ID NO: 796 - protein, 325 aa, Betula Verrucosa
AKLIGSIASRRASSIAAQTRQYGSAPHPSPAVFVDKNTRVICQGITGKNGTFHTEQAIEYGTKMVGGVTPKKGGTEHLGLPVFNSVAEAKAETKANASVIYVPPPFAAAAIMEALEAELDLVVCITEGIPQHDMVRVKAAINTQSKTRLIGPNCPGIIKPGECKIGIMPGYIHKPGRVGIVSRSGTLTYEAVFQTTAVGLGQSTCVGIGGDPFNGTNFVDCIEKFIVDPQTEGIVLIGEIGGTAEEDAAALIKESGTQKPIVAFIAGLTAPPGRRMGHAGAIVSGGKGTAQDKIKTLREAGVTVVESPAKIGVAMLDVFKQRGLV

SEQ ID NO: 797 - protein, 329 aa, Cynodon Dactylon
AATRRASHLLGSTASRLLHARGFAAAAAAAPSPAVFVDKSTRVICQGITGKNGTFHTEQAIEYGTNMVGGVTPKKGGTEHLGLPVFNSVAEAKAETKANASVIYVPPPFAAAAIMEAMDAELDLVVCITEGIPQHDMVKVKAALNRQSKTRLIGPNCPGIIKPGECKIGIMPGYIHKPGRVGIVSRSGTLTYEAVFQTTAVGLGQSTCVGIGGDPFNGTNFVDCLEKFVNDPQTEGIVLIGEIGGTAEEDAAAFIQESKTEKPVVAFIAGLTAPPGRRMGHAGAIVSGGKGTAQDKIKALREAGVTVVESPAKIGSKMFEIFKERGMVE

SEQ ID NO: 798 - protein, 311 aa, Quercus Alba
WTQTRQYAAAAAHPPPAVFVDKNTRVICQGITGKNGTFHTEQAIEYGTKMVGGVTPKKGGTEHLGLPVFNTVAEAKAETKANASVIYVPPPFAATAILEAMEAELDLVVCITEGIPQHDMVRVKSALNRQSKTRLIGPNCPGIIKPGECKIGIMPGYIHKPGRVGIVSRSGTLTYEAVFQTTAVGLGQSTCVGIGGDPFNGTNFVDCIEKFLVDPQTEGIVLIGEIGGTAEEDAAALIKESGTEKPIVAFIAGLTAPPGRRMGHAGAIVSGGKGTAQDKIKTLREAGVTVVESPAKIGVTMHDVFKQKGLV

SEQ ID NO: 799 - protein, 108 aa, Ambrosia Artemisiifolia
MALPNQQTVDYPSFKLVIVGDGGTGKTTFVKRHLTGEFEKKYEPTIGVEVHPLDFFTNCGKIRFYCWDTAGQEKFGGLRDGYYIHGQCAIIMFDVTARLTYKNVPTWH

SEQ ID NO: 800 - protein, 210 aa, Ambrosia Artemisiifolia
QGSVPTFKLVLVGDGGTGKTTFVKRHLTGEFEKKYIATLGVEVHPLGFTTNLGPIQFDVWDTAGQEKFGGLRDGYYINGQCGIIMFDVTSRITYKNVPNWHRDLVRVCENIPIVLTGNKVDVKERKVKAKTITFHRKKNLQYYDISAKSNYNFEKPFLWLARKLVGNQSLDFVAAPALAPPEVQVDQAVLDQYRQEMEAASALPLPDEDD

SEQ ID NO: 801 - protein, 129 aa, Ambrosia Artemisiifolia
FDVTARLTYKNVPTWHRDLCRVCENIPIVLCGNKVDVKNRQVKAKQVTFHRKKNLQYYEISAKSNYNFEKPFLYLARKLAGDPNLHFVESPALAPPEVQIDMVAQQQHEAELAVAANQPLPDDDDDAFE

SEQ ID NO: 802 - protein, 210 aa, Ambrosia Psilostachya
QGSVPTFKLVLVGDGGTGKTTFVKRHLTGEFEKKYIATLGVEVHPLGFTTNLGPIQFDVWDTAGQEKFGGLRDGYYINGQCGIIMFDVTSRITYKNVPNWHRDLVRVCENIPIVLTGNKVDVKERKVKAKSITFHRKKNLQYYDISAKSNYNFEKPFLWLARKLVGNQSLDFVAAPALAPPEVQVDQAVLDQYRQEMEAASALPLPDEDD

SEQ ID NO: 803 - protein, 164 aa, Ambrosia Psilostachya
MALPNQQTVDYPSFKLVIVGDGGTGKTTFVKRHLTGEFEKKYEPTIGVEVHPLDFFTNCGKIRFYCWDTAGQEKFGGLRDGYYIHGQCAIIMFDVTARLTYKNVPTWHRDLCRVCENIPIVLCGNKVDVKNRQVKAKQVTFHRKKNLQYYEISAKSNYNFEKPF

SEQ ID NO: 804 - protein, 221 aa, Betula Verrucosa
MALPNQQTVDYPSFKLVIVGDGGTGKTTFVKRHLTGEFEKKYEPTIGVEVHPLDFFTNCGKIRFYCWDTAGQEKFGGLRDGYYIHGQCAIIMFDVTARLTYKNVPTWHRDLCRVCENIPIVLCGNKVDVRNRQVKAKQVTFHRKKNLQYYEISAKSNYNFEKPFLYLARKLAGDPSLHFVESPALAPPEVQIDLAAQQQHEAELMAAASQPLPDDDDDTFE

SEQ ID NO: 805 - protein, 210 aa, Cynodon Dactylon
MALPNQQVVDYPSFKLVIVGDGGTGKTTFVKRHLTGEFEKKYEPTIGVEVHPLDFSTNCGKIRFYCWDTAGQEKFGGLRDGYYIHGQCAIIMFDVTSRLTYKNVPTWHRDLCRVCENIPIVLCGNKVDVKNRQVKAKQVTFHRKKNLQYYEISAKSNYNFEKPFLYLARKLAGDQNLHFVEAVALKPPEVQIDMAMQQQHEAELVAAAAQ

SEQ ID NO: 806 - protein, 221 aa, Quercus Alba
MALPNQQTVEYPSFKLVIVGDGGTGKTTFVKRHLTGEFEKKYEPTIGVEVHPLDFFTNCGKIRFYCWDTAGQEKFGGLRDGYYIHGQCAIIMFDVTARLTYKNVPTWHRDLCRVCENIPIVLCGNKVDVKNRQVKAKQVTFHRKKNLQYYEISAKSNYNFEKPFLYLARKLAGDPALHFVESPALAPPEVQIDLAAQQQHEAELQQAASQPLPDDDDDTFE

SEQ ID NO: 807 - protein, 221 aa, Quercus Alba
MALPNQQTVEYPSFKLVIVGDGGTGKTTFVKRHLTGEFEKKYEPTIGVEVHPLDFFTNCGKIRFYCWDTAGQEKFGGLRDGYYIHGQCAIIMFDVTARLTYKNVPTWHRDLCRVCENIPIVLCGNKVDVKNRQVKAKQVTFHRKKNLQYYEISAKSNYNFEKPFLYLARKLAGDANLHFVESPALAPPEVQIDLAAQQQHEAELQQAASQPLPDDDDDTFE

SEQ ID NO: 808 - protein, 401 aa, Ambrosia Artemisiifolia
MATKKSVSSLTEADLKGKRVFVRVDLNVPLDDTFKITDDTRIRAAVPTIKYLMSNGARVILSSHLGRPKGVTPKFSLKPLVPRLSELLGIEVKMADDCVGPEVEKLVAEIPEGGVLLLENVRFYKEEEKNDPEFAKKLASLADLYVNDAFGTAHRAHASTEGVAKHLKPAVAGFLMQKELDYLVGAVSNPKKPFAAIVGGSKVSSKIGVIESLLEKVNILVLGGGMIFTFYKAQGLAVGSSLVEEDKLDLATTLLEKAKSKGVSLLLPSDVVIADKFAADANSKVVPASSIPDGWMGLDIGPDSIKSFNEALDTTKTVIWNGPMGVFEFDKFAVGTEAIAKKLAELSGKGVTTIIGGGDSVAAVEKVGLADKMSHISTGGGASLELLEGKPLPGVLALDDA

SEQ ID NO: 809 - protein, 393 aa, Ambrosia Psilostachya
SLTEADLKGKRVFVRVDLNVPLDDTFKITDDTRIRAAVPTIKYLMSNGARVILSSHLGRPKGVTPKFSLKPLVPRLSELLGIEVKMADDCVGPEVEKLVAEIPEGGVLLLENVRFYKEEEKNDPEFAKKLASLADLYVNDAFGTAHRAHASTEGVAKHLKPAVAGFLMQKELDYLVGAVSNPKKPFAAIVGGSKVSSKIGVIESLLEKVNILVLGGGMIFTFYKAQGLAVGSSLVEEDKLDLATTLLEKAKSKGVSLLLPSDVVIADKFAADANSKVVPASSIPDGWMGLDIGPDSIKSFNESLDTTKTVIWNGPMGVFEFDKFAVGTEAIAKKLAELSGKGVTTIIGGGDSVAAVEKVGLADKMSHISTGGGASLELLEGKPLPGVLALDDA

SEQ ID NO: 810 - protein, 401 aa, Betula Verrucosa
MATKRSVSTLKEADLKGKRVFVRVDLNVPLDDNFNITDDTRIRAAVPTIKYLQAHGAKVILSSHLGRPKGVTPKYSLKPLVPRLSELLGTEVKMANDCVGEEVEKLVAEIPEGGVLLLENVRFHKEEEKNDPEFAKKLASLADLYVNDAFGTAHRAHASTEGVAKYLKPSVAGFLMQKELDYLVGAIANPKRPFAAIVGGSKVSSKIGVIESLLAKVDLLLLGGGMIFTFYKAQGYSVGSSLVEEDKLDLARSLIEKAKSKGVSLLLPTDVIIADKFAPDANSKVVPASGIPDGWMGLDIGPDSVKTFNKALDTTKTIIWNGPMGVFEFEKFAAGTEAIAKKLAELSDKGVTTIIGGGDSVAAVEKVGLAEKMSHISTGGGASLELLEGKPLPGVLALDDA

SEQ ID NO: 811 - protein, 402 aa, Cynodon Dactylon
MATKRSVGTLGEADLKGKKVFVRADLNVPLDDAQKITDDTRIRASVPTIKFLLEKGAKVILASHLGRPKGVTPKYSLKPLVPRLSELLGIDVVMANDCIGEEVEKLAAALPEGGVLLLENVRFYKEEEKNDPEFAKKLASVADLYVNDAFGTAHRAHASTEGVTKYLKPAVAGFLMQKELDYLVGAVANPKKPFAAIVGGSKVSTKIGVIESLLAKVDILILGGGMIYTFYKAQGYAVGKSLVEEDKLDLATSLIEKAKAKGVSLLLPTDIVVADKFAADAESKIVPATSIPDDWMGLDVGPDATKTFNEALDTTQTIIWNGPMGVFEFDKFAAGTEAIAKKLAELTSTKGVTTIIGGGDSVAAVEKAGLADKMSHISTGGGASLELLEGKPLPGVLALDEA

SEQ ID NO: 812 - protein, 401 aa, Quercus Alba
MATKRSVSTLKQADLKGKRVFVRVDLNVPLDDNFNITDDTRIRAAVPTIKYLQSHGARVILSTHLGRPKGVTPKYSLKPIVPRLSELLGVEVKMANDCIGEEVEKLVAETPEGGVLLLENVRFHKEEEKNDPEFSKKLASLADLYVNDAFGTAHRAHASTEGVAKFLKPAVAGFLMQKELDYLVGAVSNPKRPFAAIVGGSKVSSKIGVIESLLGKVNLLLLGGGMIFTFYKAQGYSVGSSLVEEDKLDLATTLIEKAKAKGVSLLLPTDVVIADKFAADANSKVVPASAIPDGWMGLDIGPDSIKTFNEALDTTQTVIWNGPMGVFEFEKFAAGTEAIAKKLADLSAKGVTTIIGGGDSVAAVEKVGLADKMSHISTGGGASLELLEGKPLPGVLALDDA

SEQ ID NO: 813 - protein, 221 aa, Ambrosia Artemisiifolia
GVFTDKDKAAAHLKGGAKKVVISAPSANAPMFVMGVNEKEYTPDITIVSNASCTTNCLAPLAKVIHDKFGIVEGLMTTVHSITATQKTVDGPSMKDWRGGRAASFNIIPSSTGAAKAVGKVLPALNGKLTGMAFRVPTVDVSVVDLTVRLEKKATYEQVKAAIKEESEGKLKGILGYVDEDVVSTDFVGDSRSSIFDAKAGIALNDNFLKLVSWYDNEWGY

SEQ ID NO: 814 - protein, 357 aa, Ambrosia Artemisiifolia
MSCYKGKYADELIANAAYIGTPGKGILAADESTGTIGKRLSSINVENSESNRRALRELLFCTPGALQYISGIILFEETLYQKTAAGKPFVELMKEANVLPGIKVDKGVVELAGTNGETTTTGLDGLAQRCAQYYEAGARFAKWRAVLKIGANEPSQLAINENANGLARYAIICQENGLVPIVEPEILVDGSHDINKCADVTERVLAACYKALNDHHVLLEGTLLKPNMVTPGSDSKKVAPEVVGEYTVRALQRTMPAAVPAVVFLSGGQSEEEATVNLNAINQYKGKKPWSLTFSYGRALQQSTLKAWGGKEENVKKAQETFLIRCKANSEASLGKYEGGAAGEGANESLHVKDYKY

SEQ ID NO: 815 - protein, 357 aa, Ambrosia Psilostachya; identical to SEQ ID NO: 814

SEQ ID NO: 816 - protein, 358 aa, Betula Verrucosa
MSAFKGKYHDELIANAAYIGTPGKGILAADESTGTIGKRLSSINVENVEENRRALRELLFTAPNALQYLSGVILFEETLYQKTASGQLFAELLKENGVLPGIKVDKGTVVLAGTNGETTTQGLDGLAQRCQKYYEAGARFAKWRAVLNIGPNEPSQLSINENANGLARYAIICQENGLVPIVEPEILVDGSHSIEKCADVTERVLAACYKALNDHHVLLEGTLLKPNMVTPGSDAPKVAPEVVAEHTVRALLRTVPAAVPAVVFLSGGQSEEEATINLNAMNKLKGKKPWTLSFSFGRALQSSTLKAWGGKLENVAKAQAALLARAKANSEATLGIYKGDAQLGEGASESLHVKGYKY

SEQ ID NO: 817 - protein, 358 aa, Cynodon Dactylon
MSAHVGKFADELIKNAAYIGTPGKGILAADESTGTIGKRFSSINVENIEENRRALRELLFCAPGALQYLSGVILFEETLYQKTKDGKPFVDVLKEGGVLPGIKVDKGTIEVAGTDKETTTQGHDDLGKRCAKYYEAGARFAKWRAVLKIGPNEPSQLAIDLNAQGLARYAIICQENGLVPIVEPEILVDGPHDIERCAYVTEMVLAACYKALSEHHVLLEGTLLKPNMVTPGSDAKKVAPEVIAEYTVRALQRTVPAAVPAIVFLSGGQSEEEATLNLNAMNKLNTKKPWSLSFSFGRALQASTLKAWAGKEENVEKARAALLARCKANSEATLGTYKGDAAAGEGVSESLHVKDYKY

SEQ ID NO: 818 - protein, 358 aa, Quercus Alba
MSAYQGKYADELCANAAYIGTPGKGILAADESTGTIGKRLSSINVENVEENRRALRELLFTTPGALQYLSGVILFEETLYQKTHDGKPFVNLLKENGVLPGIKVDKGTVELAGTNGETTTQGLDGLAQRCQKYYEAGARFAKWRAVLKIGPTEPSQLAINENANGLARYAIICQENGLVPIVEPEILVDGPHDILKCADVTERVLAAVYKALNDHHVLLEGTLLKPNMVTPGSEAPKVAPEVIAEHTVRALQRTMPAAVPAVVFLSGGQSEEQATVNLNAMNKYKGKKPWTLSFSFGRALQQSTLKAWGGKKENVQKAQAAFLARAKANSEATLGTYKGDATLGEGASESLHVKDYKY

SEQ ID NO: 819 - protein, 220 aa, Ambrosia Psilostachya
AKKVIISAPSKDAPMFVVGVNAHEYTPDLDIVSNASCTTNCLAPLAKVINDRFGIVEGLMTTVHAMTATQKTVDGPSMKDWRGGRAASFNIIPSSTGAAKAVGKVLPALNGKLTGMAFRVPTVDVSVVDLTVRIEKAATYEQVKAAIKEESEGKLKGILGYVDEDVVSTDFVGDSRSSIFDAKAGIALNDNFLKLVSWYDNEWGYSSRVIDLICHIASVK

SEQ ID NO: 820 - protein, 434 aa, Ambrosia Artemisiifolia
MAEKSFKYVIIGGGVSAGYAAREFAKQGVQPGELAIISKEAVAPYERPALSKAYLFPEGAARLPGFHVCVGSGGEKLLPEWYTEKGIELILNTEIVKADLASKSLTSAAGDTYKYKILIIATGSTVLKLTDFKVEGADAKNILYLREIDDADKLVEAIKAKKNGKAVVVGGGYIGLELSAVLKINNFDVKMVYPEPWCMPRLFTADIAAFYEGYYEKKGVGIIKGTVASGFTKNDNGEVKEVKLKDGRVLEADIVVVGVGARPLTNLFKGQVEEDKGGIKTDAFFKTSVPDVYAVGDVATFPMKMYGDIRRVEHVDHSRKSAEQAVKAIFASEQGKDIEAYDYLPYFYSRSFDLSWQFYGDNVGDAVIFGDHDPASAKAKFGSYWIKDGKVVGAFLEGGAPEENQAIAKVAKTQPAASSLDVLAKEGLGFASKI

SEQ ID NO: 821 - protein, 337 aa, Ambrosia Psilostachya
MGKVKIGINGFGRIGRLVARVALLSDDIELVAVNDPFISTEYMTYMFKYDSVHGPWKKHEIQVKDSNTLLFGDKPVTVFGMKNPEEIPWGEAGAEYVVESTGVFTDKDKAAAHLKGGAKKVVISAPSANAPMFVMGVNEKEYTPDITIVSNASCTTNCLAPLAKVIHDKFGIVEGLMTTVHSITATQKTVDGPSMKDWRGGRAASFNIIPSSTGAAKAVGKVLPALNGKLTGMAFRVPTVDVSVVDLTVRLEKKATYEQVKAAIKEESEGKLKGILGYVDEDVVSTDFVGDSRSSIFDAKAGIALNDNFLKLVSWYDNEWGYSSRVIDLICHIASVQ

SEQ ID NO: 822 - protein, 434 aa, Ambrosia Psilostachya
MAEKSFKYVIIGGGVSAGYAAREFAKQGVQPGELAIISKEAVAPYERPALSKAYLFPEGAARLPGFHVCVGSGGEKLLPEWYTEKGIELILNTEIVKADLASKSLTSAAGDTYKYKILIIATGSTVLKLTDFKVEGADAKNILYLREIDDADKLVEAIKAKKNGKAVVVGGGYIGLELSAVLKINNFDVKMVYPEPWCMPRLFTADIAAFYEGYYEKKGVGIIKGTVASGFTKNDNGEVKEVKLKDGRVLEADIVVVGVGARPLTNLFKGQVEEDKGGIKTDAFFKASVPDVYAVGDVATFPMKMYGDIRRVEHVDHSRKSAEQAVKAIFASEQGKDIEAYDYLPYFYSRSFDLSWQFYGDNVGDAVIFGDHDPASAKAKFGSYWIKDGKVVGAFLEGGAPEENQAIAKVAKTQPAASSLDVLAKEGLGFASKI

SEQ ID NO: 823 - protein, 434 aa, Betula Verrucosa
MAEKSFKYVIVGGGVAAGYAAKEFAKQGLKPGELAIVSKEAVAPYERPALSKAYLFPESPARLPGFHVCVGSGGERLLPEWYKEKGIELILRTEIVKADLAAKILTSAAGETFKYQILIIATGSSVIRLTDFGVQGADAKNIFYLREIDDADKLIEAFKAKKNGKAVVVGGGYIGLELGAVLKMNNYDVSMVYPEPWCMPRLFTSGIAAFYEGYYKNKGIEIIKGTVAVGFTSDSKGEVKEVKLKDGRVLEADIVVVGVGGRPLTTLFKGQVEEEKGGIKTDASFKTSVTGVYAVGDVATFPLKLYNELRRVEHVDHARKSAEQAVKAIKASEEGKTIEEYDYLPYFYSRSFDLSWQFYGDNVGDSVLFGDNNPASPKPKFGSYWIKDGKVVGAFLEGGNPEENKAIAKVARVQPPVENLDLLTKEGLSFAAKI

SEQ ID NO: 824 - protein, 433 aa, Cynodon Dactylon
MAKHFKYVILGGGVAAGYAAREFGKQGVKPGELAIISKEPVAPYERPALSKGYLFPQNAARLPGFHTCVGSGGERLLPEWYSEKGIELILSTEIVKVDLASKTLTSASEATFTYEILLIATGSSVIKLTDFGVQGAEYNNILYLRDIQDGEKLVAAMQAKKDGKAVVVGGGYIGLELSAALKMNNFDVTMVYPEPWCMPRLFTAGIAHFYEGYYASKGINLVKGTYAAGFDADSNGDVTAVKLKDGRVLEADIVIVGVGGRPLTGLFKGQVAEEKGGIKTDGFFETSVPDVYAIGDVATFPMKLYNDQRRVEHVDHARKSAEQAVRAIKAKESGESIAEYDYLPYFYSRSFDVAWQFYGDNVGDDVLFGDNDPAAAKPKFGSYWVKDGKVVGVFLEGGSADEYQAIARVARAQPQVADVEALRKDGLDFAIKT

SEQ ID NO: 825 - protein, 434 aa, Quercus Alba
MAAKSFKYVIVGGGVSAGYAAREFAKQGVKPGELAIISKEAVAPYERPALSKAYLFPESPARLPGFHVCVGSGGERLLPEWYKEKGIELILSTEIVKADLAAKTLISAAGETFNYQILIIATGSSVIRLTDFGVQGADAKNIYYLREVDDADKLVEAIKAKKNGKVVIVGGGYIGLELSAVMKINNLDVNMVYPEPWCMPRLFTADIAAFYEGFYKNKGIQIIKGTVAVGFTADSNGEVKEVKLKDGRVLEADIVVVGVGGRPLTTLFKGQVEEEKGGIKTDSFFKTSVPNVYAVGDVATFPLKLYKELRRVEHVDHSRKSAEQAVKAIKASEEGKTIEEYDYLPFFYSRSFDLSWQFYGDNVGDTVIFGDNNPETPKPKFGSYWIKDGKVLGAFLEGGTPEENKAIAKVARVQPPVENLDVLSKEGLSFACKI

SEQ ID NO: 826 - protein, 556 aa, Ambrosia Artemisiifolia
AQGSQLVTPWNMSISSGHALLRDPRLNKGLAFTEREREVHYLTGLLPPTIATQELQEKKAMQIIRQYEVPLQKYIAMIGLQERNERLFYKLLTDHVEELLPVVYTPTVGEACQKFGSIFQRPQGLYISLKDKGKVLQVLRNWPERNIEVIVVTDGERILGLGDLGCQGMGIPVGKLSLYTALGGVRPSACLPITIDVGTNNEKLLNDEFYIGLKQNRSRGEEYDELLEEFMKAVKINYGEKILIQFEDFANHNAFSLLNRYRTTHLVFNDDIQGTASVVLSGLLSALNLLGGTLSDHTFLFLGAGEAGTGIAELIALQISKKTDTSIEEARKKIWLVDSKGLVESSRTESLQHFKLPWAHEHEPVSNLLDAVEDIKPSVLIGTSGVGRQFTQEVIEAMSSINEKPLIMALSNPTSQAECTAEEAYTWSKGKAIFASGSPFDPVTYEDQVFVPGQANNAYIFPGFGLGLIMCGATRVHDDLLLAASEGLASQVTDEDYAKGIIFPPFSCIRKISAHIAAQVADKAYELGLASLLPRPNDLVQYAESCMYSPIYPNYR

SEQ ID NO: 827 - protein, 556 aa, Ambrosia Psilostachya
AQGSQLVTPWNMSISSGHALLRDPRLNKGLAFTEREREVHYLTGLLPPTIATQELQEKKAMQIIRQYEVPLQKYIAMIGLQERNERLFYKLLTDHVEELLPVVYTPTVGEACQKFGSIFQRPQGLYISLKDKGKVLQVLRNWPERNIEVIVVTDGERILGLGDLGCQGMGIPVGKLSLYTALGGVRPSACLPITIDVGTNNEKLLNDEFYIGLKQNRSRGEEYDELLEEFMTAVKINYGEKILIQFEDFANHNAFSLLNRYRTTHLVFNDDIQGTASVVLSGLLSALNLLGGTLSDHTFLFLGAGEAGTGIAELIALQISKKTDTSIEEARKKIWLVDSKGLVESSRTESLQHFKLPWAHEHEPVSNLLDAVEDIKPSVLIGTSGVGRQFTQEVIEAMSSINEKPLIMALSNPTSQAECTAEEAYTWSKGKAIFASGSPFDPVTYEDQVFVPGQANNAYIFPGFGLGLIMCGATRVHDDLLLAASEGLASQVTDEDYAKGIIFPPFSCIRKISAHIAAQVADKAYELGLASLLPRPNDLVQYAESCMYSPIYPNYR

SEQ ID NO: 828 - protein, 337 aa, Betula Verrucosa
MGKIKIGINGFGRIGRLVARVALQRDDVELVAVNDPFITTDYMTYMFKYDTVHGPWKHHELKVQDSKTLLFGDKPVTVFGIRNPEEIPWAEAGADFVVESTGVFTDKDKAAAHLKGGAKKVIISAPSKDAPMFVVGVNEKEYKPELNIVSNASCTTNCLAPLAKVINDRFGIVEGLMTTVHSITATQKTVDGPSMKDWRGGRAASFNIIPSSTGAAKAVGKVLPALNGKLTGMAFRVPTVDVSVVDLTVRLEKKASYEEIKAAIKEESEGKLKGILGYTEEDVVSTDFVGDNRSSIFDAKAGIALNDNFVKLVAWYDNEWGYSSRVVDLIRHIASVQ

SEQ ID NO: 829 - protein, 568 aa, Betula Verrucosa
GGGVQDVYGEDTATEDHFVTPWSVSVASGYSLLRDPHHNKGLAFTERERDAHFLRGLLPPTVASQELQVKKMMHNIRQYQVPLQKYMAMMDLQERNEKLFYKLLIDNVEELLPIVYTPTVGEACQKYGSIFMRPQGLFISLKEKGKILEVLRNWPEKNIQVIVVTDGERILGLGDLGCQGMGIPVGKLSLYTALGGVRPSACLPITIDVGTNNEQLLNDEFYIGLRQRRATGQEYAELLHEFMTAVKQIYGEKVLIQFEDFANHNAFDLLAKYGTTHLVFNDDIQGTASVVLAGLVAAQKLVGGTLADHRYLFLGAGEAGTGIAELIALEISKQTNAPLEETRKKVFLVDSKGLIVSSRKESLQHFKKPWAHEHEPVKELVDAVKVIKPTVLIGTSGVGNKFTKEVVEAMASINERPIILALSNPTSQSECTAEEAYRWSQGRAIFASGSPFAPVEYEGKVFVPGQANNAYIFPGFGLGLLMSGAIRVHDDMLLAASEALAAQVTQEDFDKGLIFPPFTNIRKISAQIAAKVAAKAYELGLATRLPQPIDLVKCAESCMYSPAYRSYR

SEQ ID NO: 830 - protein, 570 aa, Cynodon Dactylon
MAGGGVEDAYGEDRATEEQLVTPWAFSVASGYTLLRDPRHNKGLAFSEAERDAHYLRGLLPPAFASQELQEKKLMHNLRQYTVPLQRYIAMMDLQERNERLFYKLLIDNVEELLPVVYTPTVGEACQKYGSIYRRPQGLYISLKDKGKILEVLKNWPERSIQVIVVTDGERILGLGDLGCQGMGIPVGKLSLYTALGGVRPSACLPITIDVGTNNETLLNDEFYIGLRQRRATGEEYHELLEEFMTAVKQNYGEKVLIQFEDFANHNAFDLLAKYSKSHLVFNDDIQGTASVVLAGLLASLKVVGGSLADHTYLFLGAGEAGTGIADLIALEMSKHNEMPIDECRKKIWLVDSKGLIVESRKESLQHFKKPWAHEHEPLKTLLEAVESIKPTVLIGTSGVGRTFTKEVIEAMASFNEKPVIFSLSNPTSHSECTAEEAYTWTQGRAVFASGSPFDPVEYEGKVYVPGQSNNAYIFPGFGLGVVISGAIRVHDDMLLAASEALAEQVTEEHFGKGLIFPSFTNIRGISARIAAKVAAKAYELGLASHLPRPDDLVKYAESCMYTPAYRSYR

SEQ ID NO: 831 - protein, 568 aa, Quercus Alba
AGGVRDVYGEDSATEDQFVTPWSVSVASGYSLLRDPHHNKGLAFTIRERDAHFLRGLLPPTVASQDLQVKKMMHNIRQYQVPLQKYMAMMDLQERNQRLFYKLLIDNVEELLPIVYTPTVGEACQKYGSIFMRPQGLFISLKEKGKILEVLRNWPEKNIQVIVVTDGERILGLGDLGCQGMGIPVGKLSLYTALGGIRPSACLPITIDVGTNNEKLLNDEFYIGLKQKRATGQEYAELLDEFMMAVKQNYGEKVLIQFEDFANHNAFDLLAKYGTTHLVFNDDIQGTASVVLAGLVAGQKLVGGTLADHRFLFLGAGEAGTGIAELIALEMSKQTKAPLEETRKKIWLVDSKGLIVSSRKESLQQFKKPWAHEHEPIKELVDAVKAIRPTVLIGTSGVGRTFTKEVVEAMASINEKPIILALSNPTSQSECTAEEAYTWSQGRAIFASGSPFPPVEYDGKVFMPGQANNAYVFPGLGLGLIMSGAIRVHDDMLLAASEALAAQVSQENFDRGLLYPPFTNIRKISAHIAANVAAKAYELGLATRLPEPKDLVKYAESCMYSPAYRNYR

SEQ ID NO: 832 - protein, 337 aa, Quercus Alba
MGKIKIGINGFGRIGRLVARVALERDDVELVAVNDPFITTDYMTYMFKYDTVHGQWKHHELKVKDSKTLLFGDRPVATFGIRNPEEIPWGEAGAEFVVESTGVFTDKEKAAAHLKAGAKKVIISAPSKDAPMFVVGVNENDYKPELDIVSNASCTTNCLAPLAKVIHDRFGIVEGLMTTVHSITATQKTVDGPSMKDWRGGRAASFNIIPSSTGAAKAVGKVLPSLNGKLTGMAFRVPTVNVSVVDLTVRLEKKASYEEIKAAIKEESEGKLKGILGYTQEDVVSSDFVGDSRSSIFDAKAGIALNDNFVKLVSWYDNEWGYSSRVIDLIRHIASVQ

SEQ ID NO: 833 - protein, 336 aa, Cynodon Dactylon
MAKIKIGINGFGRIGRLVARVALQSDDVELVAVNDPFITTDYMTYMFKYDTVHGQWKHHDVKVKDSKTLLFGEKEVTVFGCRNPEEIPWGEAGAEYVVESTGVFTDKDKAAAHLKGGAKKVVISAPSKDAPMFVCGVNEKEYKSDIHIVSNASCTTNCLAPLAKVINDKFGIVEGLMTTVHAITATQKTVDGPSAKDWRGGRAASFNIIPSSTGAAKAVGKVLPALNGKLTGMAFRVPTVDVSVVDLTVRLEKSATYDEIKAAIKAESEGDLKGILGYVEEDLVSTDFQGDNRSSIFDAKAGIALNDKFVKLVSWYDNEWGYSSRVIDLIRHMHST

SEQ ID NO: 834 - protein, 216 aa, Ambrosia Artemisiifolia
SSGQVIRCKAAVAREAGKPLVIEEVEVAPPQKMEVRLKIHFTSLCHTDVYFWEAKGQHPLFPRILGHEAGGIVESVGEGVTELKPGDKVLPIFTGECGECRHCKSEESNMCDLLRINTDRGVMINDGKTRFSKDGQPIYHFLGTSTFSEYTVVHSGCVAKINPDAPLDKVCVLSCGISTGMGATLNVAKPKKGMSVAIFGLGAVGLAAAEGARIAG

SEQ ID NO: 835 - protein, 69 aa, Ambrosia Artemisiifolia
WEAKGQNPVFPRILGHEAGGVVESVGEGVTDLQPGDHVLPVFTGECKECAHCKSEESNMCDLLRINTDR

SEQ ID NO: 836 - protein, 377 aa, Ambrosia Psilostachya
TTTGQVIRCKAAVAWEAGKPLVMEEVEVAPPQKHEVRIKILFTSLCHTDVYFWEAKGQNPVFPRILGHEAGGVVESVGEGVTDLQPGDHVLPVFTGECKECAHCKSEESNMCDLLRINTDRGVMLHDQKSRFSINGKPIFHFVGTSTFSEYTVVHVGCLAKINPDAPLDKVCVLSCGISTGLGATLNVAKPKKGSSVAVFGLGAVGLAAAEGARIAGASRIIGVDLNANRFELAKKFGVTEFVNPKDYKKPVQEVIAELTNGGVDRSVECTGHIDAMISAFECVHDGWGVAVLVGVPHKDAVFKTNPMNLLNERTLKGTFFGNYKPRSDIPSVVEKYMNKELELEKFITHEVPFSEINKAFDLMLKGEGLRCIIRMD

SEQ ID NO: 837 - protein, 269 aa, Ambrosia Psilostachya
GKPLVIEEVEVAPPQKMEVRLKIHFTSLCHTDVYFWEAKGQHPLFPRILGHEAGGIVESVGEGVTELKPGDKVLPIFTGECGECRHCKSEESNMCDLLRINTDRGVMINDGKTRFSKDGQPIYHFLGTSTFSEYTVVHSGCVAKINPDAPLDKVCVLSCGISTGMGATLNVAKPKKGMSVAIFGLGAVGLAAAEGARIAGASRIIGIDLNPSRAKEAMKFGVTEFVNPKDHDKPIHEVIAAMTDGGVDRSVECTGNVKAMISAFECVHD

SEQ ID NO: 838 - protein, 96 aa, Ambrosia Psilostachya
CVHDGWGVAVLVGVPNKDDEFKTLPINFLNERTLKGTFFGNYKPRTDIPGVVEKYMNKELEVEKFITHTIGFSEINKAFDYMLKGESLRCIIRMDA

SEQ ID NO: 839 - protein, 381 aa, Ambrosia Psilostachya
SMSTTTGQVIRCKAAVAWEAGKPLVMEEVEVAPPQKHEVRIKILFTSLCHTDVYFWEAKGQNPVFPRILGHEAGGVVESVGEGVTDLQPGDHVLPVFTGECKECAHCKSEESNMCDLLRINTDRGVMLHDQKSRFSINGKPIFHFVGTSTFSEYTVVHVGCLAKINPDAPLDKVCVLSCGISTGLGATLNVAKPKKGSSVAVFGLGAVGLAAAEGARIAGASRIIGVDLNANRFELAKKFGVTEFVNPKDYKKPVQEVIAELTNGGVDRSVECTGHIDAMISAFECVHDGWGVAVLVGVPHKDAVFKTNPMNLLNERTLKGTFFGNYKPRSDIPSVVEKYMNKELELEKFITHEVPFSEINKAFDLMLKGEGLRCIIRMDA

SEQ ID NO: 840 - protein, 405 aa, Anthoxanthum Odoratum
SSVAIWVLFPSEIVISVPVDSRGERAMATAGKVIKCKAAVAWEAGKPLSIEEVEVAPPQAMEVRVKILFTSLCHTDVYFWEAKGQTPVFPRIFGHEAGGIVESVGEGVTDVAPGDHVLPVFTGECKECPHCKSAESNMCDLLRINTDRGVMISDGKSRFSIDGKPIYHFVGTSTFSEYTVMHVGCVAKINPEAPLDKVCVLSCGISTGLGASINVAKPPKGSTVAIFGLGAVGLAAAEGARIAGASRIIGIDLNANRFEEARKFGCTEFVNPKDHSKPVQEVLIEMTNGGVDRSVECTGNVNAMIQAFECVHDGWGVAVLVGVPHKDAEFKTHPMKFLNERTLKGTFFGNFKPRTDLPNVVEMYMKKELEVEKFITHSVPFSEINKAFDLMARGEGIRCIIRMEN

SEQ ID NO: 841 - protein, 332 aa, Anthoxanthum Odoratum
HTDVYFWEAKGQTPVFPRILGHEAGGIVESVGEGVTELVPGDHVLPVFTGECKECAHCKSEESNLCDLLRINVDRGVMIGDGQSRFTIDGKPIFHFVGTSTFSEYTVIHVGCLAKINPEAPLDKVCVLSCGISTGLGATLNVAKPKKDSTVAIFGLGAVGLAAMEGAKMAGASRIIGVDLNPAKYEQAKKFGCTDFVNPKDHTKPVQEVLVEMTNGGVDRAVECTGHIDAMIAAFECVHDGWGVAVLVGVPHKEAVFKTHPMNFLNERTLKGTFFGNYKPRTDLPEVVEMYMRKELDVEKFITHSVPFSQINTAFDLMLKGEGLRCVMRMGE

SEQ ID NO: 842 - protein, 375 aa, Betula Verrucosa
MATQGQVITCKAAVAWEPNKPLVIEDVQVAPPQAGEVRIKILFTALCHTDAYTWSGKDPEGLFPCILGHEAAGIVESVGEGVTEVQPGDHVIPCYQAECQECKFCKSGKTNLCGKVRSATGVGVMLSDRKSRFSVNGKPIYHFMGTSTFSQYTVVHDVSVAKIDPKAPLEKVCLLGCGVPTGLGAVWNTAKVEPGSIVAVFGLGTVGLAVAEGAKAAGASRIIGIDIDSKKYDVAKNFGVTEFVNPKDHEKPIQQVLVDLTDGGVDYSFECIGNVSVMRAALECCHKGWGTSVIVGVAASGQEISTRPFQLVTGRVWKGTAFGGFKSRSQVPWLVEKYLKKEIKVDEYITHNLTLEEINKAFDLMHEGGCLRCVL

SEQ ID NO: 843 - protein, 376 aa, Betula Verrucosa
TAGQVIKCKAAVAWEAGKPLVIEEVEVAPPQANEVRVKILFTSLCHTDVYFWEAKGQTPLFPRIFGHEAGGIVESVGEGVTDLKPGDHVLPVFTGECKECRHCKSEESNMCDLLRINTDRGVMLSDGKTRFSIKGQPIYHFVGTSTFSEYTVVHVGCLAKINPKAPLDKVCILSCGISTGLGATLNVAKPKKGQSVAVFGLGAVGLAAAEGARIAGASRIIGVDLNPDRFEEAKKFGVTEFVNPKDHNKPVQEVIAELTDGGVDRAVECTGSIQAMISAFECVHDGWGVAVLVGVPSKDDAFKTHPMNLLNERTLKGTFFGNYKPRTDIPGVVEKYMNKELELEKFITHTVPFSEINKAFDYMLHGKSIRCIISMD

SEQ ID NO: 844 - protein, 411 aa, Betula Verrucosa
LTIYITAERDTDTDLSQSKQRSPSSSSSEIAMSSTAGQVIKCKAAVAWEAGKPLVIEEVEVAPPQANEVRVKILFTSLCHTDVYFWEAKGQTPLFPRIFGHEAGGIVESVGEGVTDLKPGDHVLPVFTGECKECRHCKSEESNMCDLLRINTDRGVMLSDGKTRFSIKGQPIYHFVGTSTFSEYTVVHVGCLAKINPKAPLDKVCILSCGISTGLGATLNVAKPKKGQSVAVFGLGAVGLAAAEGARIAGASRIIGVDLNPDRFEEAKKFGVTEFVNPKDHNKPVQEVIAELTDGGVDRAVECTGSIQAMISAFECVHDGWGVAVLVGVPSKDDAFKTHPMNLLNERTLKGTFFGNYKPRTDIPGVVEKYMNKELELEKFITHTVPFSEINKAFDYMLHGKSIRCIISMDA

SEQ ID NO: 845 - protein, 395 aa, Cynodon Dactylon
SLEERLVDLGFLLEKQMATTGKVIKCKAAVAWEAGKPLSMEEVEVAPPQAMEVRIKILFTSLCHTDVYFWEAKGQNPVFPRIFGHEAGGIVESVGEGVTDVAPGDHVLPVFTGECKECAHCKSAESNMCDLLRINTDRGVMIGDGKSRFSINGKPIYHFVGTSTFSEYTVMHVGCVAKINPEAPLDKVCVLSCGISTGLGASINVAKPPKGSTVAVFGLGAVGLAAAEGARIAGASRIIGVDLNPNRFEEARKFGCTEFVNPKDHKKPVQEVLAEMTNGGVDRSVECTGNINAMIQAFECVHDGWGVAVLVGVPHKDAEFKTHPMNFLNERTLKGTFFGNFKPRTDLPNVVELYMKKELEVEKFITHTVPFSEINKAFDLMAKGEGIRCIIRMDH

SEQ ID NO: 846 - protein, 379 aa, Cynodon Dactylon
MATTGKVIKCKAAVAWEAGKPLSMEEVEVAPPQAMEVRIKILFTSLCHTDVYFWEAKGQNPVFPRIFGHEAGGIVESVGEGVTDVAPGDHVLPVFTGECKECAHCKSAESNMCDLLRINTDRGVMIGDGKSRFSINGKPIYHFVGTSTFSEYTVMHVGCVAKINPEAPLDKVCVLSCGISTGLGASINVAKPPKGSTVAVFGLGAVGLAAAEGARIAGASRIIGVDLNPNRFEEARKFGCTEFVNPKDHKKPVQEVLAEMTNGGVDRSVECTGNINAMIQAFECVHDGWGVAVLVGVPHKDAEFKTHPMNFLNERTLKGTFFGNFKPRTDLPNVVELYMKKELEVEKFITHTVPFSEINKAFDLMAKGEGIRCIIRMDH

SEQ ID NO: 847 - protein, 383 aa, Fraxinus Excelsior
LSMSNTAGLVIPCKAAVSWEAGKPLVIQQVEVAPPQAMEVRVQIKYTSLCHTDLYFWEAKGQTPLFPRIFGHEAAGIIESVGEGVSDLQVGDHVLPVFTGECGDCAHCKSQESNMCDLLRINTDRGVMLSDGNSRFSINGNPINHFLGTSTFSEYTVVHSGCLAKVNPLAPLDKICILSCGISTGLGATLNVAKPKKGSSVAIFGLGAVGLAAAEGARIAGASRIIGIDLNPNRFDEAKKFGVTEFVNPKEHDRPVQQVIAEMTNGGVDRSVECTGNVNVMVSAFECVHDGWGVAVLVGVPNKDAVFMTKPINLLNERTLKGTFFGNYKPRTDLPSVVDMYMNKKLELDKFITHRLSFSEINKAFEYMVKGEGLRCIISMEDE

SEQ ID NO: 848 - protein, 389 aa, Fraxinus Excelsior
TLSKRKGTKMSSTAGQVIRCKAAVSWEAGKPLVIEEVDVAPPQKMEVRLKILFTSLCHTDVYFWEAKEQTPLFPRIFGHEAGGIVESVGEGVADLQPGDHVLPMFTGECKECRHCKSTESNMCDLLRINTDRGVMINDGKTRFSKNGQPIYHFLGTSTFSEYTVVHVGCVAKINPAAPLEKVCVLSCGISTGLGATLNVARPTKGSTVAIFGLGAVGLAAAEGARISGASRIIGIDLNPNRFKDAKKFGVTEFVNPKDHDRPVQQVLVEMTDGGVDRSVECTGNVDAMISAFECVHDGWGVAVLVGVPNKDDTFKTRPVNLLNERTLKGTFFGNYKPRSDIPSVVEKYMNKELELDKFITHQVRFSEINKAFDLMLRGESLRCIINMEA

SEQ ID NO: 849 - protein, 407 aa, Fraxinus Excelsior
IPPTGFSISHQTSYIQITQFTEIKKQISDMSSTVGQVIKCKAAVAWEAGKPLVIEEVEVAPPQKMEVRLKILFTSLCHTDVYFWEAKAQDSVFPRIFGHEAAGIVESVGEGVTELTPGDHVLPVFTGECKECAHCKSEESNMCSLLRINTDRGVMINDGQTRFSINGKPIYHFVGTSTFSEYTVVHVGCVAKINPLAPLDKVCVLSCGISTGLGATLNVAKPKKGSSVAIFGLGAVGLGAAEGARLAGASRIIGVDLNSGRFEEAKKFGVTEFVNPKDHKKPVQEVIAEMTDGGVDRSVECTGNVNAMISAFECVHDGWGVAVLVGVPHKDAEFKTHPMNLLNERTLKGTFFGNYKPRSDLPSVVELYMNNELELEKFITHEVPFNEINKAFELMLKGEGLRCIIRM

SEQ ID NO: 850 - protein, 292 aa, Lollium Perenne
HTDVYFWEAKGQTPVFPRILGHEAGGIVESVGEGVTELVPGDHVLPVFTGECKECAHCKSEESNLCDLLRINVDRGVMIGDGQSRFTINGKPIFHFVGTSTFSEYTVIHVGCLAKINPEAPLDKVCVLSCGISTGLGATLNVAKPKKGSTVAIFGLGAVGLAAMEGAKMAGASRIIGVDLNPAKYEQAKKFGCTDFVNPKDHTKPVQEVLVEMTNGGVDSAVECTGNINAMISAFECVHDGWGVAVLVGVPHKEAVFKTHPMNFLNERTLKGTFFGNYKPRTDLPEVVEMYM

SEQ ID NO: 851 - protein, 383 aa, Lollium Perenne
GEGAMATAGKVIKCKAAVAWEAGKPLSIEEVEVAPPQAMEVRVKILFTALCHTDVYFWEAKGQTPVFPRIFGHEAGGIVESVGEGVTELAPGDHVLPVFTGECKECPHCKSAESNMCDLLRINTDRGVMLSDGKSRFSIDGKPIYHFVGTSTFSEYTVLHVGCVAKINPEAPLDKVCVLSCGISTGLGASINVAKPPKGSTVAIFGLGAVGLAAAEGARIAGASRIIGIDLNANRFEEARKFGCTEFVNPKDHNKPVQEVLIEMTNGGVDRSVECTGNINAMIQAFECVHDGWGVAVLVGVPHKDAEFKTHPMNFLNERTLKGTFFGNFKPRTDLPNVVEMYMKKELEVEKFITHSVPFSEINKAFDLMAKGEGIRCIIRMEN

SEQ ID NO: 852 - protein, 390 aa, Olea Europaea
TFLHFRGKSSMSNTAGLVIPCKAAVSWEAGKPLVIQQVEVAPPQAMEVRVKIKYTSLCRTDLYFWEAKGQTPLFPRIFGHEAAGIIESVGEGVSDLQVGDHVLPVFTGECGDCAHCKSEESNMCDLLRINTDRGFMLSDGKSRFSINGNPINHFLGTSTFSEYTVVHSGCLAKVNPLAPLDKICVLSCGISTGLGATLNVAKPKKGSSVAIFGLGAVGLAAAEGARIAGASRIIGIDRNPSRFDEAKKFGVTEFVNPKEHNRPVQQVIAEMTNGGVDRSVECTGNINAMVSAFECVHDGWGVAVLVGVPNKDAVFMTKPINLLNERTLKGTFFGNYKPRTDLPSIVDMYMNKKLELDKFITHHLSFSEINKAFEYMVKGEGLRCIISMED

SEQ ID NO: 853 - protein, 385 aa, Olea Europaea
KKQISEMSSTVGQVIKCKAAVAWEAGKPLVIEEVEVAPPQKMEVRLKVLFTSLCHTDVYFWEAKAQNSAFPRIFGHEAAGIVESVGEGVTELAPGDHVLPVFTGECKECAHCKSEESNMCSLLRINTDRGVMINDGQTRFSINGKPIYHFVGTSTFSEYTVVHIGCVAKINPLAPLDKVCILSCGISTGLGATLNVAKPTKGSSVAIFGLGAVGLGAAEGARLAGASRIIGVDLNPSRFEEAKKFGVTEFVNPKDHKKPVQEVIAEMTDGGVDRSVECTGNVNAMISAFECVHDGWGVAVLVGVPHKDAEFKTHPMNLLNERTLKGTFFGNYKPRSDLPSVVEMYMNKELELEKFITHEVPFHEINKAFELMLKGEGLRCIIRME

SEQ ID NO: 854 - protein, 387 aa, Olea Europaea
FLFTFIDSMATKGQAITCKAAVAWEPNKPLVIEEVQVAPPQAGEVRIKILFTALCHTDAYTWSGKDPEGLFPCILGHEAAGVVESVGEGVIELQPGDHVIPCYQAECKECKFCKSGKTNLCGKVRVATGAGVMLSDRNSRFSINGKPIYHFMGTSTFSQYTVVHDVSVAKIDPKAPLEKVCLLGCGIPTGLGAVWNTAKVEQGSIVAVFGLGTVGLAVAEGAKAAGASRIIGIDIDSKKFDTAKKFGVTEFINPKDYDKPIQQVIVDLTDGGVDYSFECIGNVSVMRSALECCHKGWGTSVIVGVAASGQEISTRPFQLVTSRVWKGTAFGGFKSRSQVPWLVDKYMKKEIKVDEYISHNLTLAEINKAFDLMHDGVCLRVVLNMHA

SEQ ID NO: 855 - protein, 303 aa, Plantago Lanceolata
ESVGEGVTELAPGDHVLPVFTGECGDCAHCKSQESNMCNLLRINVERGVMINDGKSRFSINGKPVYHFVGTSTFSEYTVVHVGCLAKINPAAPLDKVCVLSCGISTGLGATLNVAKPKKGQSVAIFGLGAVGLGAAEGARLAGASRIIGVDLNSSRFEEAKKFGVTEFVNPKDYKKPVQEVIAEMTDGGVDRSVECTGNINAMISAFECVHDGWGVAVLVGVPHKDAEFKTHPMNVLNERTLKGTFFGNYKPRSDLPSVVEMYMNKELELEKFITHEVPFAEINKAFDLMLKGEGLRCIIKME

SEQ ID NO: 856 - protein, 184 aa, Plantago Lanceolata
FPNQIYNSLNLNFQAAEGARVSGASRIIGIDLNPARFEQAKKFGVTECLNPKDHKKPIQEVIVEMTDGGVDRSVECTGNVTAMISAFECVHDGWGVAVLVGVPNKEDAFKTNPVNLLNERTLKGTFFGNYKPRSDIPVVVEKYMNKEMELDKFITHRVPFSEINKAFDYMIRGESLRCIISMEN

SEQ ID NO: 857 - protein, 219 aa, Plantago Lanceolata
EIMSSTTGQVIRCKAAVSWEAGKPLVIEEVEVAPPQKMEVRIKILFTSLCHTDVYFWEAKGQTPLFPRIFGHEAGGIVESVGEGVTDIQPGDHVLPVFTGECKECRHCKSAESNMCDLLRINTDRGVMIQDGKSRFSKDGKPIHHFLGTSTFSEYTVVHVGCVAKINPEAPLDKVCVLSCGFSTGFGATVNVAKPPQGSTVAIFGLGAVGLAAAEGARV

SEQ ID NO: 858 - protein, 383 aa, Poa Pratensis
AQRTMATAGKVIKCKAAVAWEAGKPLSIEEVEVAPPQAMEVRVKILFTSLCHTDVFFWEPKVQKPLFPRIFGHEAGGIVESVGEGVTDVAPGDHVLPVFTGECKECRHCKSAESNMCDLLRINTDRGVMISDGKSRFSIDGKPIYHFVGTSTFSEYTVMHVGCVAKINPEAPLDKVCVLSCGISTGLGASINVAKPPKGSTVAIFGLGAVGLAAAEGARIAGASRIIGVDLNANRFEEARKFGCTEFVNPKDHTKPVQEVLAEMTDGGVDRSVECTGNINAMIQAFECVHDGWGVAVLVGVPHKDAEFKTHPMNFLNERTLKGTFFGNFKPRTDLPNVVEMYMKKELEVEKFITHSVPFSEINKAFDLMAKGEGIRCIIRMEH

SEQ ID NO: 859 - protein, 394 aa, Quercus Alba
YYNIERKMENGLRNPSETTGKVITCKAAITWGPGEPFVIEEVRVDPPQKMEVRIKILFTSICHTDLSAWQGENEAQRAYPRILGHEASGIVESVGEGVMDIKKGDHVVPIFNGECGDCLYCKCEKTNMCERAGVNPFMTVMVNDGKSRFSCKEGKPIFHFLNTSTFSEYTVVESACVVKIDPDASLKTMTLLSCGVSTGVGAAWNIANVKAGSTVAIFGLGAVGLAVAEGARARGATKIIGVDINPNKFTKGRAMGITDTINPRDFEKPVHECIREMTGGGVDYSFECAGISEVLREAFLSTHEGWGLTVILGIHTSPKMLPLHPMELFTGRVIIASVFGGFKGKTQLPNFAKECMQGVVNLEEFITHELPFEKINEAFQLLIDGKSVRCMLHL

SEQ ID NO: 860 - protein, 315 aa, Quercus Alba
RIFGHEAGGIVESVGEGVTDLKPGDHALPVFTGECKECRHCKSEESNMCDLLRINTDRGVMLNDGKSRFSINGQPIYHFVGTSTFSEYTVLHVGSVAKINPAAPLDKVCVLSCGISTGLGATLNVAKPKKGSTVAVFGLGAVGLAAAEGARIAGASRIIGVDLNAKRFDEAKKFGVTEFVNPKDHDKPVHEVLAEMTNGGVDRSIECTGSINAMISAFECVHDGWGVAVLVGVPNKDDAFKTHPMNILNERTIKGTFFGNYKPRSDLPSVVEKYMNKELELEKFITHEVSFSEINKAFEYMLRGEGLRCIIRMDA

SEQ ID NO: 861 - protein, 369 aa, Quercus Alba
KAAIAWEAGKPLVIEQVEVAPPQTMEVRIKIKYTSLCHTDLYFWEAKGQTPLFPRIFGHEAAGVVESVGEGVSDLQVGDHVLPVFTGECGDCRHCKSEESNMCDLLRINTDRGVMLNDGKSRFSINGTPINHFLGTSTFSEYTVVHSGCLTKISPLAPLDKVCILSCGISTGLGATLNVAKPKKGSTVAVFGLGAVGLAAAEGARIAGASRIIGIDLSPKRYEEAKKFGVTEFVNPKDHDRPVQEVIAEMTNGGVDRSIECTGNINCMISAFECVHDGWGVAVLVGVPNKDAVFMTKPINVLNERTLKGTFFGNYKPRTDLPSVVDMYMNKKLEVEKFITHRVPFSDINKAFEYMLKGEGLRCIISMEE

SEQ ID NO: 862 - protein, 381 aa, Quercus Alba
AMSSTAGQVIKCKAAVAWEAGKPLVIEEVELAPPQANEVRMKILFTALCHTDVYFWEAKGQTPMFPRIFGHEAGGIVESVGEGVTELKPGDHVLPIFTGECGKCSHCNSEESNLCDTLRINTERGVLLNDGKTRFSKNGQPIYHFLGTSTFSEYTIAHVGCVAKINPAAPLDKVCVLSCGVSTGMGATLNVAKPKKGQSVAVFGLGAVGLAACEGARMAGAGKIIGVDLNPDRFNEAKKFGVTDFVNPKDHDKPVQEVIAEMTNGGVDRAVECTGSFQAMIQAFECVHDGWGVAVLVGVPNKDDAFKTHPLNFLNERTLKGTFFGNYKPRTDIPSQVEKYMKKELELEKFITHSVPFSEINKAFDYMLKGESIRCIIRMDA

SEQ ID NO: 863 - protein, 381 aa, Quercus Alba
AMSSTAGQVIKCRAAVAWEAGKPLVIEEVEVAPPQANEVRMRILFTALCHTDVYFWEAKGQTPLFPRIFGHEAGGIVESVGEGVTELKPGDHVLPIFTGECGKCSHCNSEESNLCDTLRINTERGVLLNDGKTRFSKNGQPIYHFLGTSTFSEYTIAHVGCVAKINPAAPLDKVCVLSCGVSTGMGATLNVAKPKKGQSVAVFGLGAVGLAACEGARMAGAGKIIGVDLNPDRFNEAKKFGVTDFVNPKDHDKPVQEVIAEMTDGGVDRALECTGSIQAMISAFECVHDGWGVAVLVGVPNKDDSFQTHPVNFLNERTLKGTFFGNYKPRTDIPSVVEKYMNKELELEKFITHSVPFSEINKAFDYMLKGQSIRCIIRMGA

SEQ ID NO: 864 - protein, 377 aa, Quercus Alba
MATQGQVITCKAAVAWEPNKPLVIEDVQVAPPQAGEVRIKILFTALCHTDAYTWSGKDPEGLFPCILGHEAAGIVESIGEGVTEVQPGDHVIPCYQAECRECKFCKSGKTNLCGKVRSATGVGVMLSDRKSRFSVNGKSIYHFMGTSTFSQYTVVHDVSVAKIDPKAPLEKVCLLGCGVPTGLGAVWNTAKVESGSIVAIFGLGTVGLAVAEGAKTAGASRIIGIDIDSKKFDTAKKFGVTEFVNPKDHEKPIQQVIVDLTDGGVDYSFECIGNVSVMRAALECCHKGWGTSVIVGVAASGQEISTRPFQLVTGRVWKGTAFGGFKSRSQVPWLVEKYLKKEIKVDEYITHNLTLGEINEAFHLMHEGGCLRCVLKV

SEQ ID NO: 865 - protein, 211 aa, Ambrosia Artemisiifolia
VVSPPFVFLTTVKSELRPEIQVAAQNCWVKKGGAFTGEVSAEMLANLGVPWVILGHSERRALLNESNEFVGDKVAYALSQGLKVIACVGETLEQREAGTTMDVVAAQTKAIADKISSWDNVVLAYEPVWAIGTGKVASPAQAQEVHAGLRKWFEENISAEVSATTRIIYGGSVSGSNCKELAGQPDVDGFLVGGASLKPEFINIIKAAEAK

SEQ ID NO: 866 - protein, 228 aa, Ambrosia Psilostachya
VSTLNAGDLPSTDIVEVVVSPPFVFLTTVKSELRPEIQVAAQNCWVKKGGAFTGEVSAEMLANLGVPWVILGHSERRALLNESNEFVGDKVAYALSQGLKVIACVGETLEQREAGTTMDVVAAQTKAIADKISSWDNVVLAYEPVWAIGTGKVASPAQAQEVHAGLRKWFEENISAEVAATTRIIYGGSVSGSNCKELAGQPDVDGFLVGGASLKPEFINIIKAAEAK

SEQ ID NO: 867 - protein, 254 aa, Betula Verrucosa
MARKFFVGGNWKCNGTTEEVKKIVSTLNEAQVPSQDVVEVVVSPPFVFLPLVKTLLRPDIHVAAQNCWVKKGGAYTGEVSAEMLVNLGIPWVILGHSERRLILNESNEFVGDKVAYALEKGLKVIACVGETLEQRESGSTVEIVAAQTKAIAERVSNWANVVLAYEPVWAIGTGKVATPAQAQEVHSELRKWLQANTSPEVAATTRIIYGGSVNGANCKELAAKPDVDGFLVGGASLKPEFIDIIKSAEVKKSA

SEQ ID NO: 868 - protein, 129 aa, Betula Verrucosa
RKFFVGGNWKCNGTAEEVKKIVSTLNEAEVPSEDVVEVVVSPPFVFLPLVKSLLRSDFHVAAQNCWVRKGGAFTGEISAEMLVNLGIPWVILGHSERRALLSESNEFVGDKVAYALSQGIKVIACVGET

SEQ ID NO: 869 - protein, 247 aa, Cynodon Dactylon
GGNWKCNGTGEDVKKIVTVLNEAEVPSEDVVEVVVSPPFVFLQQVKGLLRPDFSVAAQNCWVRKGGAFTGEISAEMLVNQQLPWVILGHSERRALLGESNDFVADKVAYALSQGLKVIACIGETLEQREAGTTMDVVAAQTKAIAEKISDWTNVVLAYEPVWAIGTGKVASPAQAQEVHDGLRKWLQSAVSPAVAESTRIIYGGSVNGGNCKELAAQPDVDGFLVGGASLKPEFVDIIKSATVKSSS

SEQ ID NO: 870 - protein, 253 aa, Cynodon Dactylon
MGRKFFVGGNWKCNGTTEQVDKIVKTLNEGQIPSTDVVEVVVSPPYVFIPVVKTQLRPEIQVAAQNCWVKKGGAYTGEVSAEMLANLGVPWVILGHSERRALLGESNEFVGDKVAYALAQGLKVIACVGETLEQRESGSTMDVVAAQTKAIAERIQDWTNVVVAYEPVWAIGTGKVATPAQAQEVHASLREWLKTNVSPEVSESTRIIYGGSVTAANCKELAGQPDVDGFLVGGASLKPEFIDIINSATVKSA

SEQ ID NO: 871 - protein, 254 aa, Quercus Alba
MARKFFVGGNWKCNGTTEEVKKIVSTLNEGQVPPPDVVEVVVSPPFVFLPLVKNLLRPDFHVAAQNCWVKKGGAFTGEVSAEMLVNLGIPWVILGHSERRQILNETNEFVGEKVAYALSKGLKVIACVGETLEQRESGTTVEVVAAQTKAIAERVSNWADVVLAYEPVWAIGTGKVATPAQAQEVHFELRKWFHANISPEVAATIRIIYGGSVNGANSKELAVQPDVDGFLVGGASLKPEFIDIIKSAEVKKSA

SEQ ID NO: 872 - protein, 127 aa, Ambrosia Psilostachya
AASQWLYVVPWGLRKILNYISRKYNNPPIYITENGMDDEDNDASSLHEMLDDKLRIAYYKGYLASVFLAIKDGVDVRGYFAWSLVDNFEWPLGYTKRFGLVYIDYKNGLTRHPKSSAYWFMKLLKGE

SEQ ID NO: 873 - protein, 495 aa, Betula Verrucosa
LLSVIVIQCVAHATELNVNDTGGLGRHNFPKGFVFGTATSAYQVEGMAHKDGRGPSIWDPFVKIPGNIANNATADVSVDQYHRYKEDVDIMAKFNFDAYRFSISWSRIFPNGRGKVNWKGVAYYNRLIDYLLKRGITPYANLYHYDLPLALEMKYKGLLSDQVVKDFADYADFCFKTFGDRVKNWMTFNEPRVVAALGYDNGIFAPGRCSKAFGNCTAGNSATEPYIAAHHLILSHAAAVQRYRQKYQEKQKGRIGILLDFVWYEPLTKSKDDNNAAQRARDFHVGWFIHPIVYGEYPRTMQDIVADRLPRFTKEEVKMVKGSIDFVGINQYTAFYMYDPHQPKPKDLGYQQDWNVGFAYEKNGVPIGPRANSNWLYIVPWGLYKALTYIKEHYGNPTVILSENGMDDPGNVTLSKGLHDTTRINFYTGYLTQLKKAVDEGANVFGFFAWSLLDNFEWRSGYTSRFGIVYVDYTNLKRYPKMSAYWFKRLLRRNQ

SEQ ID NO: 874 - protein, 482 aa, Cynodon Dactylon
TMALSAHGKVGENTNLTRESFPPGFVFGTASSAYQVEGNANKYGRGPCIWDTFLMHPGTTPDNATANVTVDEYHRYMDDVDNMVRVGFDAYRFSISWSRIFPSGVGKINKDGVDYYHRLIDYMLANKITPYVVLHHFDLPQVLQDQYNGWLSPRVVGDFEKFADFCFKTYGDRVKNWFTINEPRMMAVHGYSDAFFAPARCTGCKVGGNSATEPYIAGHHLLLSHAAAVKTYREKYQAQQKGKIGILLDFVWYEPLSDSMEDGYAAHRARMFTLGWFLHPITYGHYPPSMENIVRGRLPNFTFEQSEMVKGSADYIGINHYTTYYASHYINDTEMSYRNDWSVKLSYSRNGVPIGKKAYSDWLYVVPWGIYKAVMWTKEKFNNPVIIIGENGIDQPGNETLPGALYDTFRIDYFEQYLRELKSAVNDGANVIGYFAWSLLDTFEWRLGFTSKFGLVYVDRQTFTRYPKDSARWFRKVIKREE

SEQ ID NO: 875 - protein, 480 aa, Quercus Alba
SMSLDSGGLSRDKFPKGFVFGTATSAYQVEGMAHKDGRGPSIWDTFVKIPGIVANNGTADVSVDQYHRYKEDIDIMKKLNFDAYRFSISWSRIFPDGTGKVNHKGVAYYNRLINYLLRRGITPYANLYHYDLPLALEKKYKGLLSDQVVKDFADYADFCFRTFGDRVKNWMTFNEPRVVAALGYDNGFFAPGRCSKPYGNCTAGNSATEPYIVAHHLILAHAAAVQRYREKYLEKQKGRIGILLDFVWYEPLTRSKADNYAAQRARDFHVGWFIHPIVYGEYPRTMQDIVGDRLPKFTKEEVKMVKGSMDFVGINQYTAYYMYDPHKSKPKVLGYQQDWNAGFAYNKKGVPIGPKANSYWLYNVPWGLYKAITYIKEHYGNPTVILSENGMDDPGNVTISKGLHDTTRINFYKGYLTQLKKAVDEGANVVGYFAWSLLDNFEWRLGYTSRFGIVYVDFANLKRYPKMSAYWFKRLLKRNK

SEQ ID NO: 876 - protein, 145 aa, Ambrosia Artemisiifolia
VSGGSLIKSLRKLVEEPYVGSVDWSKWHMFWVDERVVPKDHPDSNYLLAFDGFLSKVPIPPGNVHAINDALSAEAAADDYETHIKHLVHNGIISTSETTGFPKFDLMLLGMGPDGHVASLFPGHPLLAEKSKWVTFIKESPKPPP

SEQ ID NO: 877 - protein, 208 aa, Ambrosia Psilostachya
GGSLIKSLRKLVEEPYVGSVDWSKWHMFWVDERVVPKDHPDSNYLLAFDGFLSKVPIPPGNVHAINDALSAEAAADDYETHIKHLVHNGIISTSATTGFPKFDLMLLGMGPDGHVASLFPGHPLLAEKSKWVTFIKESPKPPPERITFTFPVINSSANVALVVAGAGKAHPVHVALGNGQEPEPLPVQMVAPEGQLAWFLDKDAASKL

SEQ ID NO: 878 - protein, 259 aa, Betula Verrucosa
MAATTAEKGGDKKKVEVFDTEEDLAVSLAKYTADLSDKFSKERGAFTVVLSGGSLIKSLRKLLEPPYIDSVEWSKWHVFWVDERVVPKDHEDSNYKLAYDGFLSKIPIVPGHVYAINDALSAEGAADDYETCLKHLVKINVIDLSAASGFPKFDLMLLGMGPDGHVASLFPGHPLLKENEKWVTFIKDSPKPPPERITFTFPVVNSSAYIALVVAGAGKAGVVQQALGNGQNSDKLPVQIVSPEGELTWFLDKDAASKL

SEQ ID NO: 879 - protein, 321 aa, Cynodon Dactylon
SATAAAAVAFLPPLTGRTSPPAYRVPANSRRGSVSNSRIFTSFAPSPILRAAAMATDGAAPAASDAGSKQKLLTFDSEEELAVSLAKYTAELSAKFAAERGAFTAVLSGGSLIKALRKLTEPPYLDSVDWSKWHVFWVDERVVPKDHEDSNYKLALDGFLSKVPIPTRQVYAINDALSAEGAADDYETCLKQLVKNGVIAMSAATGFPRFDLQLLGMGPDGHIASLFPGHPLVNENQKWVTYIKDSPKPPPERITFTFPVINSSAYIAMVVTGAGKAAAVQKALSDKEISSDKLPVEMAVLQDGEFTWFTDKEAVSLLQNK

SEQ ID NO: 880 - protein, 253 aa, Quercus Alba
MATKGEVKKEVFESGEDLAVALAKYTAQLSDKFCKERGAFSVVLSGGSLINSLRKLVEPPYIDSIEWSRWHIFWADERVVPKDHEDSNYKLAYDGFLSKVPIPPGNVYAINDALSAEGAAEDYETCLRHLVKSNVVDISAASGFPKFDLQLLGMGPDGHVASLFPGHPLVKENEKWVAFIKDSPKPPPERITFTFPVINSSAYIALVVNGANKAGAVQNALGNSQNSEKLPVAMVSPEGELAWFLDTAAASKL

SEQ ID NO: 881 - protein, 100 aa, Ambrosia Artemisiifolia
MGPGEWSPEMRKTYNLLDAVSRHTIQVYPRSWTAIMLTFDNAGMWSVRSNIWERHYLGEQFYISVTSPERSLRDEYNMPDNALRCGKVVGLPLPPSYAAA

SEQ ID NO: 882 - protein, 100 aa, Ambrosia Psilostachya
MGPGEWSPELRKTYNLLDAVSRNSIQVYPRSWTAVMLTFDNAGMWNVRSNLWERHYLGEQFYISVVSPARSLRDEYNMPEDDLRCGKVVGLPMPPSYLPA

SEQ ID NO: 883 - protein, 97 aa, Betula Verrucosa
IEPGRWSPVKRKNYNLLDAVSRHNIQVYPNSWAAIMTTLDNAGMWSLRSEMWERVYLGQQLYFSVLSPARSLRDEYNLPDNTPLCGIVPGLPLPPPY

SEQ ID NO: 884 - protein, 100 aa, Cynodon Dactylon
MGPGTWSPQSRKTYNLLDTVSRHTIQVYPRSWTAVMLTFDNAGMWNVRSNLWERQYLGEQMYISVISPARSLRDEYNMPETSLRCGKVVGLPMPPSYLPA

SEQ ID NO: 885 - protein, 100 aa, Quercus Alba; identical to SEQ ID NO: 882

SEQ ID NO: 886 - protein, 563 aa, Ambrosia Artemisiifolia
GVELARRDMATTTRVAAGVLLVLSALALVARAEDPYLFFEWKVTYGTKPVLGVPQKVILINGEFPGPRINCTSNNNIVVNVFNQLDHPLLFTWNGMQHRKNSWMDGMPGTQCPILPNTNFTYKWQPKDQIGSFYYFPSIGMQRAAGGYGGISVYSRLLIPVPFDQPPPENDHVVLIGDWYTKDHEVLARQLDAGKSVGRPAGVVINGKGGKDLEAAPLFTFEAGKTYRLRVCNTGIKASLNFRIQGHIMTLVELEGSHTLQDVYDSLDVHVGHCLSVLVDADQKPGDYYMVASTRFIHDAKSAKAIIRYAGSSAPPPAELPEPPAGWAWSINQARSFRWNLTSSAARPNPQGSYHYGQINITRTIKVRVSRGHINGKLRYGFSGVSHRDPETPVKLAEYFNVTDGVFSYNQMGDVPPAVNGPLHVVPNVITAEFRTFIEIVFENPEKSLDSVHLDGYAFFGVGMGPGEWSPEMRKTYNLLDAVSRHTIQVYPRSWTAIMLTFDNAGMWSVRSNIWERHYLGEQFYISVTSPERSLRDEYNMPDNALRCGKVVGLPLPPSYAAA

SEQ ID NO: 887 - protein, 555 aa, Ambrosia Psilostachya
AMGRTTFVALFICLSAGALMVHAEDPYHFFEWNVTYGTIAPLGVPQQGILINGQFPGPKINCTSNNNIVVNVFNHLDEPFLLTWNGVQQRKNSWQDGTLGTMCPILPGKNFTYHFQVKDQIGSFYYFPTTGLHKASGAIGGLQVHSRDLIPVPFDNPADEYFLLLGDWYNKGHKSLKKLLDSGRSIGRPDGIQINGKSGKVGDEAAEPLFTMESGKTYRYRVCNVGMRTSINFRLQGHTLKLVEMEGSHTVQNVYDSLDLHAGQCLSVLITANQAPKDYYLVVSSRFAQHQLSSVAIIRYLNGNSPASLELPPSPPDNTEGIAWSINQFRSFRWNLTASAARPNPQGSYHYGQINITRTIKLANSRSYVDGKLRFGLNGVSHVDSETPLKLAEYFEASDKLFKYDIIKDEPPQDDTKVILAPNVLNATFRNFVEIIFENHERTIQTYHLDGYSFFAVAIEPGRWSPEKRKNYNLLDAVSRHSIQVYPNSWAAVMTTLDNAGMWSLRSEMWERVYLGQQLYFSVLSPARSLRDEYNLPDNTPLCGIVPGLPLPPPY

SEQ ID NO: 888 - protein, 551 aa, Betula Verrucosa
RGRKMGGVMFILMLCLTAGAMSGVRGEDPYLFFTWNVTYGTISPLGVPQQGILINGQFPGPNINSTTNNNIVINVHNSLHEPFLLTWSGIQHRKNSWQDGVLGTMCPIPPGTNYTYHFQVKDQIGSYIYYPTTATHRAAGAFGGLRVNSRLLIPVPYADPEDDYTVLIGDWYAKSHQTLRKFLDSGRSLGRPDGVLINGKSGKDKPLFTMKAGKTYKYRICNVGVKNSLNFRIQGHTMKLVELEGSHTVQNTYQSLDVHVGQCLSVLVTADQKPKDYYVVASTRFTKSVLTGKGIIRYIGGKGPASPEIPEAPVGWAWSLNQFRTFRWNLTASAARPNPQGSFHYGAINITRTIKLVNSASKVDGKHRYAVNGISHIDPPTPLKLAEYYGVADKVFKYDTIPDDPPAQGAPNITSAPVVLNMTFRNFVEIIFENHEKSIQSWHLDGYSFFAVAIEPGRWTPERRRNYNLLDAVSRHTVQVFPKSWAAILLTFDNAGMWNIRSEIVERRYLGQQLYASILSPARSLRDEYNIPDNALLCGLVKNLPKPPPYV

SEQ ID NO: 889 - protein, 543 aa, Cynodon Dactylon
GVLLVLTALAVVHAEDPYLFFEWKVTYGTKSLLGVPQKVILINGEFPGPRINCSSNNNIVVNVFNQLDQPLLFTWNGMQHRKNSWMDGLPGTNCPIAPGTNFTYKWQPKDQIGSFFYFPSLGMQRAAGGYGPISVVSRLLIPVPFDPPADDHVVLIGDWYTKDHEVMARLLDSGRSIGRPAGVLINGKGGKDAAAAPIFTFEAGKTYRLRVCNTGIKSSLNFRIQGHDMKLVEMDGSHTVQDMFDSLDVHPGHCFSVLVDADQKPGDYYVVASTRFIHDPKSVSAVIRYAGSSTPPAPHVPEPPEGWAWSINQWRSFRWNLTASAARPNPQGSYHYGQINITRTIKLQISRGHIDGKLRYGFNGVSHVDADTPLKLAEYFNVTDGVFKYNQMGDAPPAVNGPLRVMPSVISAEFRTFIEVIFENPEKSMDSLHLDGYAFFAVGMGPGKWSPELRKTYNLLDAVSRHTIQVYPRSWTAIMLTFDNAGMWNVRSNIWERHYLGEQVYVSVISPERSLRDEYNMPENALRCGKVIGLPLPPSYNPA

SEQ ID NO: 890 - protein, 555 aa, Quercus Alba
AMGRMTFVELFLCLSAGALMVHAEDPYHFFEWNVTYGTIAPLGVPQQGILINGQFPGPKINCTSNNNIVVNVFNNLDEPFLLTWNGVQHRKNSWQDGTLGTMCPILPGKNFTYHFQVKDQIGSFYYFPTTGLHKASGAIGGLQVHSRDLIPVPFDNPADEYFVVLGDWYNKGHKSLKKLLDSGRSIGRPDGIQINGKSGKVGDKVAEPLFTMESGKTYRYRVCNVGMRTSVNFRLQGHTLKLVEMEGSHTVQNVYDSLDLHAGQCLSVLITANQAPKDYYLVVSSRFAQHQLSSVAIIRYLNGNSPASLELPPSPPDNTEGIAWSINQFRSFRWNLTASAARPNPQGSYHYGQINITRTIKLTNSRSYVDGKLRFGLNGVSHVDSETPLKLAEYFEASDKVFKYDLMKDEPPQENTKVTLAPNVLNATFRNFVEIIFENHERTIQTYHLDGYSFFAVAIEPGRWSPEKRKNYNLLDAVSRHSIQVYPNSWAAIMTTLDNAGMWSLRSEMWERVYLGQQLYFSVLSPARSLRDEYNMPDNTPLCGIVRGLPLPPPY

SEQ ID NO: 891 - protein, 204 aa, Ambrosia Psilostachya
NITRTIKLKITRGHLDGKLKYGFNGVSHVDADTPLKLAEYFNVTDGVFRYNQMGDSPPGVNGPLHAIPNVITAEFRTFIEIIFENPEKSMDSLHLDGYAFFAVGMGPGEWSPELRKTYNLLDAVSRNSIQVYPRSWTAVMLTFDNAGMWNVRSNLWERHYLGEQFYISVVSPARSLRDEYNMPEDDLRCGKVVGLPMPPSYLPA

SEQ ID NO: 892 - protein, 50 aa, Ambrosia Psilostachya
LWERHYLGEQMYISVISPARSLRDEYNMPETSLRCGKVVGLPMPPSYLPA

SEQ ID NO: 893 - protein, 353 aa, Ambrosia Psilostachya
AATAGGVLLLALLVLSTTQVARAEDPYLFFEWHVTYGTRTLLGVPQKVILINDEFPGPRINCSSNNNIVVNVFNQLEEPLLFTWNGMQQRKNSWQDGLPGTNCPVAPGTNYTFKWQAKDQIGSFFYFPSLGMQRAAGGYGMISVVSRLLIPVPFDPPADDHVVLIGDWYTKDHTVMASLLDAGKSPGRPAGVLINGKGGNDAASQPMFTFEAGKTYRLRVCNVGIKSSLNFRIQGHDMKLVEMEGSHTLQNTYDSLDVHVGQCLSVLVDADQKPADYLMVASTRFIADATSVSAVIRYAGSNTPAAANVPEPPAGWAWSINQWRSFRWNLTASAARPNPQGSYHYGQINITRT

SEQ ID NO: 894 - protein, 112 aa, Ambrosia Psilostachya
AATAGGVLLLALLVLSTTQVARAEDPYLFFEWHVTYGTRTLLGVPQKVILINDEFPGPRINCSSNNNIVVNVFNQLDQPLLFTWNGMQHRKNSWMDGLPGTNCPIAPGTNFT

SEQ ID NO: 895 - protein, 608 aa, Anthoxanthum Odoratum
PPPSYSHKPGDVFHGRLLIDPPIPPQLLHYNPSRERNLFHSVRRPLILMATTMRGTAATAGGVLLLALLVLSTTQVARAEDPYLFFEWHVTYGTRTLLGVPQKVILINDEFPGPRINCSSNNNIVVNVFNQLEEPLLFTWNGMQQRKNSWQDGLPGTNCPVAPGTNYTFKWQAKDQIGSFFYFPSLGMQRAAGGYGMISVVSRLLIPVPFDPPADDFQVLVGDWYTKDHTVMASLLDAGKSPGRPAGVLINGKGGKDAASQPMFTFEAGKTYRLRVCNVGIKSSLNFRIQGHDMKLVEMEGSHTLQNTYDSLDVHVGQCLSVLVDADQKPADYLMVASTRFIADATSVSAVIRYAGSNTPPAANVPEPPAGWAWSINQWRSFRWNLTASAARPNPQGSYHYGQINITRTIKLKITRGHLDGKLKYGFNGVSHVDADTPLKLAEYFNVTDGVFRYNQMGDSPPGVNGPLHAIPNVITAEFRTFIEIIFENPEKSMDSLHLDGYAFFAVGMGPGEWSPELRKTYNLLDAVSRNSIQVYPRSWTAVMLTFDNAGMWNVRSNLWERHYLGEQFYISVVSPARSLRDEYNMPEDDLRCGKVVGLPMPPSYLPA

SEQ ID NO: 896 - protein, 608 aa, Anthoxanthum Odoratum
PPPSYSHKPGDVFHGRLLIDPPIPPQLLHYNPSRERNLFHSVRRPLILMATTMRGTAATAGGVLLLALLVLSTTQVARAEDPYLFFEWHVTYGTRTLLGVPQKVILINDEFPGPRINCSSNNNIVVNVFNQLEEPLLFTWNGMQQRKNSWQDGLPGTNCPVAPGTNYTFKWQAKDQIGSFFYFPSLGMQRAAGGYGMISVVSRLLIPVPFDPPADDFQVLVGDWYTKDHTVMASLLDAGKSPGRPAGVLINGKGGKDAASQPMFTFEAGKTYRLRVCNVGIKSSLNFRIQGHDMKLVEMEGSHTLQNTYDSLDVHVGQCLSVLVDADQKPADYLMVASTRFIADATSVSAVIRYAGSNTPPAANVPEPPAGWAWSINQWRSFRWNLTASAARPNPQGSYHYGQINITRTIKLKITRGHLDGKLKYGFNGVSHVDADTPLKLAEYFNATKGIFEYNLIGDTPPPEGTPIKLAPNVINTEWRTYIEVVFENPEKSIDSFHLNGYAFFAAGMGPGLWTPECRQTYNLLDTVSRHTIQVYPRSWTAVMLTFDNAGMWNLRSNLWERYYMGEQMYISCVSPARSLRDEYNMPENGLRCGNVIGLPLPPSYIPG

SEQ ID NO: 897 - protein, 554 aa, Betula Verrucosa
IDRGRKMGGVMFILMLCLTAGAMSGVRGEDPYLFFTWNVTYGTISPLGVPQQGILINGQFPGPNINSTTNNNIVINVHNSLHEPFLLTWSGIQHRKNSWQDGVLGTMCPIPPGTNYTYHFQVKDQIGSYIYYPTTATHRAAGAFGGLRVNSRLLIPVPYADPEDDYTVLIGDWYAKSHQTLRKFLDSGRSLGRPDGVLINGKSGKDKPLFTMKAGKTYKYRICNVGVKNSLNFRIQGHTMKLVELEGSHTVQNTYQSLDVHVGQCLSVLVTADQKPKDYYVVASTRFTKSVLTGKGIIRYIGGKGPASPEIPEAPVGWAWSLNQFRTFRWNLTASAARPNPQGSFHYGAINITRTIKLVNSASKVDGKHRYAVNGISHIDPPTPLKLAEYYGVADKVFKYDTIPDDPPAQGAPNITSAPVVLNMTFRNFVEIIFENHEKSIQSWHLDGYSFFAVAIEPGRWTPERRRNYNLLDAVSRHTVQVFPKSWAAILLTFDNAGMWNIRSEIVERRYLGQQLYASILSPARSLRDEYNIPDNALLCGLVKNLPKPPPYSI

SEQ ID NO: 898 - protein, 554 aa, Betula Verrucosa
IDRGRKMGGVMFILMLCLTAGAMSGVRGEDPYLFFTWNVTYGTISPLGVPQQGILINGQFPGPNINSTTNNNIVINVHNSLHEPFLLTWSGIQHRKNSWQDGVLGTMCPIPPGTNYTYHFQVKDQIGSYIYYPTTATHRAAGAFGGLRVNSRLLIPVPYADPEDDYTVLIGDWYAKSHQTLRKFLDSGRSLGRPDGVLINGKSGKDKPLFTMKAGKTYKYRICNVGVKNSLNFRIQGHTMKLVELEGSHTVQNTYQSLDVHVGQCLSVLVTADQKPKDYYVVASTRFTKSVLTGKGIIRYIGGKGPASPEIPEAPVGWAWSLNQFRTFRWNLTASAARPNPQGSFHYGAINITRTIKLVNSASKVDGKHRYAVNGISHIDPPTPLKLAEYYGVADKVFKYDTIPDDPPAQGAPNITSAPVVLNMTFRNFVEIIFENHEKSIQSWHLDGYSFFAVAIEPGRWTPERRRNYNLLDAVSRHTVQVFPKSWAAILLTFDNAGMWNIRSEIVERRYLGQQLYASILSPARSLRDEYNIPDNALLCGLVKNLPKPPPYVI

SEQ ID NO: 899 - protein, 122 aa, Betula Verrucosa
IFENHERTIQTYHLDGYSFFAVAIEPGRWSPVKRKNYNLLDAVSRHNIQVYPNSWAAIMTTLDNAGMWSLRSEMWERVYLGQQLYFSVLSPARSLRDEYNLPDNTPLCGIVPGLPLPPPYTA

SEQ ID NO: 900 - protein, 592 aa, Cynodon Dactylon
TIAQTPHYTFHSREHHITRARPASVCLPREHFGRRPAGIMAATMRAAAAGVLLVLTALAVVHAEDPYLFFEWKVTYGTKSLLGVPQKVILINGEFPGPRINCSSNNNIVVNVFNQLDQPLLFTWNGMQHRKNSWMDGLPGTNCPIAPGTNFTYKWQPKDQIGSFFYFPSIAMQRSAGGYGLISVHSRDLIPVPFDIPADDFAVLAGDWYTKDHTVLAKHLDAGKGIGRPAGLIINGKNDKDAASAPMYNFEAGKTYRFRVCNVGIKASLNVRVPGHNLKLVEMEGSHTVQNMYDSLDVHVGQCLSFLVTADQKPADYFLVVSTRFIKEVSTITALIRYKGSSTPPSPKLPEGPSGWAWSINQWRSFRWNLTASAARPNPQGSYHYGQINITRTIKLQISRGHIDGKLRYGFNGVSHVDADTPLKLAEYFNATDGVFQYNLISDVPPKAGTPIKLAPNVLSAEFRTFIEVVFENPEKSIDSFHIDGYAFFAAGMGPGTWSPQSRKTYNLLDTVSRHTIQVYPRSWTAVMLTFDNAGMWNVRSNLWERQYLGEQMYISVISPARSLRDEYNMPETSLRCGKVVGLPMPPSYLPA

SEQ ID NO: 901 - protein, 593 aa, Cynodon Dactylon
TIAQTPHYTFHSREHHITRARPASVCLPREHFGRRPAGIMAATMRAAAAGVLLVLTALAVVHAEDPYLFFEWKVTYGTKSLLGVPQKVILINGEFPGPRINCSSNNNIVVNVFNQLDQPLLFTWNGMQHRKNSWMDGLPGTNCPIAPGTNFTYKWQPKDQIGSFFYFPSLGMQRAAGGYGPISVVSRLLIPVPFDPPADDHVVLIGDWYTKDHEVMARLLDSGRSIGRPAGVLINGKGGKDAAAAPIFTFEAGKTYRLRVCNTGIKSSLNFRIQGHDMKLVEMDGSHTVQDMFDSLDVHPGHCFSVLVDADQKPGDYYVVASTRFIHDPKSVSAVIRYAGSSTPPAPHVPEPPEGWAWSINQWRSFRWNLTASAARPNPQGSYHYGQINITRTIKLQISRGHIDGKLRYGFNGVSHVDADTPLKLAEYFNVTDGVFKYNQMGDAPPAVNGPLRVMPSVISAEFRTFIEVIFENPEKSMDSLHLDGYAFFAVGMGPGKWSPELRKTYNLLDAVSRHTIQVYPRSWTAIMLTFDNAGMWNVRSNIWERHYLGEQVYVSVISPERSLRDEYNMPENALRCGKVIGLPLPPSYNPAR

SEQ ID NO: 902 - protein, 592 aa, Cynodon Dactylon
TIAQTPHYTFHSREHHITRARPASVCLPREHFGRRPAGIMAATMRAAAAGVLLVLTALAVVHAEDPYLFFEWKVTYGTKSLLGVPQKVILINGEFPGPRINCSSNNNIVVNVFNQLDQPLLFTWNGMQHRKNSWMDGLPGTNCPIAPGTNFTYKWQPKDQIGSFFYFPSLGMQRAAGGYGPISVVSRLLIPVPFDPPADDHVVLIGDWYTKDHEVMARLLDSGRSIGRPAGVLINGKGGKDAAAAPIFTFEAGKTYRLRVCNTGIKSSLNFRIQGHDMKLVEMDGSHTVQDMFDSLDVHPGHCFSVLVDADQKPGDYYVVASTRFIHDPKSVSAVIRYAGSSTPPAPHVPEPPEGWAWSINQWRSFRWNLTASAARPNPQGSYHYGQINITRTIKLQISRGHIDGKLRYGFNGVSHVDADTPLKLAEYFNATDGVFQYNLISDVPPKAGTPIKLAPNVLSAEFRTFIEVVFENPEKSIDSFHIDGYAFFAAGMGPGTWSPQSRKTYNLLDTVSRHTIQVYPRSWTAVMLTFDNAGMWNVRSNLWERQYLGEQMYISVISPARSLRDEYNMPETSLRCGKVVGLPMPPSYLPA

SEQ ID NO: 903 - protein, 593 aa, Cynodon Dactylon
TIAQTPHYTFHSREHHITRARPASVCLPREHFGRRPAGIMAATMRAAAAGVLLVLTALAVVHAEDPYLFFEWKVTYGTKSLLGVPQKVILINGEFPGPRINCSSNNNIVVNVFNQLDQPLLFTWNGMQHRKNSWMDGLPGTNCPIAPGTNFTYKWQPKDQIGSFFYFPSIAMQRSAGGYGLISVHSRDLIPVPFDIPADDFAVLAGDWYTKDHTVLAKHLDAGKGIGRPAGLIINGKNDKDAASAPMYNFEAGKTYRFRVCNVGIKASLNVRVPGHNLKLVEMEGSHTVQNMYDSLDVHVGQCLSFLVTADQKPADYFLVVSTRFIKEVSTITALIRYKGSSTPPSPKLPEGPSGWAWSINQWRSFRWNLTASAARPNPQGSYHYGQINITRTIKLQISRGHIDGKLRYGFNGVSHVDADTPLKLAEYFNVTDGVFKYNQMGDAPPAVNGPLRVMPSVISAEFRTFIEVIFENPEKSMDSLHLDGYAFFAVGMGPGKWSPELRKTYNLLDAVSRHTIQVYPRSWTAIMLTFDNAGMWNVRSNIWERHYLGEQVYVSVISPERSLRDEYNMPENALRCGKVIGLPLPPSYNPAR

SEQ ID NO: 904 - protein, 203 aa, Fraxinus Excelsior
ITRTIKLKITRGHLDGKLKYGFNGVSHVDADTPLKLAEYFNVTDGVFRYNQMGDSPPGVNGPLHAIPNVITAEFRTFIEIIFENPEKSMDSLHLDGYAFFAVGMGPGEWSPELRKTYNLLDAVSRNSIQVYPRSWTAVMLTFDNAGMWNVRSNLWERHYLGEQFYISVVSPARSLRDEYNMPEDDLRCGKVVGLPMPPSYLPA

SEQ ID NO: 905 - protein, 203 aa, Fraxinus Excelsior
ITRTIKLKITRGHLDGKLKYGFNGVSHVDADTPLKLAEYFNVTDGVFRYNQMGDSPPGVNGPLHAIPNVITAEFRTFIEIIFENPEKSMDSLHLDGYAFFAVGMGPGEWSPELRKTYNLLDAVSRNSIQVYPRSWTAVMLTFDNAGMWNVRSNLWERQYLGEQMYISVISPARSLRDEYNMPETSLRCGKVVGLPMPPSYLPA

SEQ ID NO: 906 - protein, 154 aa, Fraxinus Excelsior
ISVVSRLLIPVPFDPPADDLQVLIGDWYTKDHAVMASLLDAGKSFGRPAGVLINGRGGKDATNPPMFTFEAGKTYRLRVCNVGIKSSLNFRIQGHDMKLVEMEGSHTLQNTYDSLDVHVGQCLSVLVDADQKPADYLMVASTRFMVEPSSVSAV

SEQ ID NO: 907 - protein, 192 aa, Fraxinus Excelsior
PPSYSHKPGDVFHGRLLIDPPIPPQLLHYNPSRERNLFHSVRRPLILMATTMRGTAATAGGVLLLALLVLSTTQVARAEDPYLFFEWHVTYGTRTLLGVPQKVILINDEFPGPRINCSSNNNIVVNVFNQLEEPLLFTWNGMQQRKNSWQDGLPGTNCPVAPGTNYTYKWQPKDQIGSFFYFPSIGMQRAVG

SEQ ID NO: 908 - protein, 74 aa, Fraxinus Excelsior
WKVTYGTKNIMGTPQKVILINDMFPGPTINCTSNNNIVINVFNMLDQPLLFTWHGIQQRKNSWQDGMPGTNCPV

SEQ ID NO: 909 - protein, 595 aa, Lollium Perenne
PLSHFHRPPHATHRSTAAAALIDLHTSRPEEETRRARRDMTAGSRMRACAAAAVLALALLAVAVRAEDPYLFFEWKVTYGTRSPMGVPQKMILINDAFPGPTINCTSNNNIIVNVFNQIDKPLLFTWHGIQQRKNSWQDGMPGAMCPIMPGTNFTYKMQFKDQIGTFFYFPSIGMQRAAGGYGLISIHSRPLIPIPFDPPAADFSAMIGDWFTKDHTVLEKHLDTGKTIGRPAGLLINGKNEKDASNPPMYEVEAGKTYRFRICNVGIKASLNVRVQGHITRLVEMEGSHTVQNEYDSIDVHVGQCLSVLVTANQKPGDYFFVASTRFIKEVNTITAVIRYKGSNTPPSPKLPEAPSGWAWSINQWRSFRWNLTASAARPNPQGSYHYGQINITRTIKLMVTRGHLEGKLKYGFNGVSHVDADTPLKLAEYFNVSDKVFKYNQMGDSPPGVNGPMHVAPNVITAEFRTFIEVVFENPEKSMDSLHIDGYAFFAVGMGPGKWSPDLRKTYNLLDAVSRHTIQVYPRSWSAVMLTFDNAGMWNLRSNLWERYYMGEQLYVSCTSPARSLRDEYNMPENGLRCGKIVGLPLPAPYIIA

SEQ ID NO: 910 - protein, 595 aa, Lollium Perenne
PLSHFHRPPHATHRSTAAAALIDLHTSRPEEETRRARRDMTAGSRMRACAAAAVLALALLAVAVRAEDPYLFFEWKVTYGTRSPMGVPQKMILINDAFPGPTINCTSNNNIIVNVFNQIDKPLLFTWHGIQQRKNSWQDGMPGAMCPIMPGTNFTYKMQFKDQIGTFFYFPSIGMQRAAGGYGLISIHSRPLIPIPFDPPAADFSAMIGDWFTKDHTVLEKHLDTGKTIGRPAGLLINGKNEKDASNPPMYEVEAGKTYRFRICNVGIKASLNVRVQGHITRLVEMEGSHTVQNEYDSIDVHVGQCLSVLVTANQKPGDYFFVASTRFIKEVNTITAVIRYKGSNTPPSPKLPEAPSGWAWSINQWRSFRWNLTASAARPNPQGSYHYGQINITRTIKLMVTRGHLEGKLKYGFNGVSHVDADTPLKLAEYFNVSDKVFKYNQMGDSPPGVNGPMHVAPNVITAEFRTFIEVVFENPEKSMDSLHIDGYAFFAVGMGPGKWSPDLRKTYNLLDAVSRHTIQVYPRSWSAVMLTFDNAGMWNVRSNLWERHYLGEQLYISVISPARSLRDEYNMPETALRCGKVVGLPLPPSYLPA

SEQ ID NO: 911 - protein, 592 aa, Lollium Perenne
IPYPAATPTLLSFKRAELDSARQVFHPARLPPILMAATTMRATAAGGVLLLALLLVTTNVARAEDPYVFFEWHVTYGTKSLLGVPQKVILINGEFPGPRINCSSNNNIVVNVFNQLDQPLLFTWNGIQHRKNSWQDGMPGTNCPVVPGTNYTFKWQAKDQIGSFFYFPSIGMQRTVGGYGLISVVSRLLIPVPFDPPADDLQVLIGDWYNKDHTVMASLLDAGKSPGRPAGVLINGRGAKDAANPPMFTFEAGKTYRLRICNVGIKASLNFRIQGHDMRLVEMDGSHTVQDSFDSLDVHVGHCLSVLVDADQKPADYLMVASTRFMVEPSSVSAVIRYAGSNTPPAPNVPEPPAGWAWSLNQWRSFRWNLTASAARPNPQGSYHYGQINITRTIKLMVTRGHLEGKLKYGFNGVSHVDADTPLKLAEYFNVSDKVFKYNQMGDSPPGVNGPMHVAPNVITAEFRTFIEVVFENPEKSMDSLHIDGYAFFAVGMGPGKWSPDLRKTYNLLDAVSRHTIQVYPRSWSAVMLTFDNAGMWNVRSNLWERHYLGEQLYISVISPARSLRDEYNMPETALRCGKVVGLPLPPSYLPA

SEQ ID NO: 912 - protein, 592 aa, Lollium Perenne
IPYPAATPTLLSFKRAELDSARQVFHPARLPPILMAATTMRATAAGGVLLLALLLVTTNVARAEDPYVFFEWHVTYGTKSLLGVPQKVILINGEFPGPRINCSSNNNIVVNVFNQLDQPLLFTWNGIQHRKNSWQDGMPGTNCPVVPGTNYTFKWQAKDQIGSFFYFPSIGMQRTVGGYGLISVVSRLLIPVPFDPPADDLQVLIGDWYNKDHTVMASLLDAGKSPGRPAGVLINGRGAKDAANPPMFTFEAGKTYRLRICNVGIKASLNFRIQGHDMRLVEMDGSHTVQDSFDSLDVHVGHCLSVLVDADQKPADYLMVASTRFMVEPSSVSAVIRYAGSNTPPAPNVPEPPAGWAWSLNQWRSFRWNLTASAARPNPQGSYHYGQINITRTIKLMVTRGHLEGKLKYGFNGVSHVDADTPLKLAEYFNVSDKVFKYNQMGDSPPGVNGPMHVAPNVITAEFRTFIEVVFENPEKSMDSLHIDGYAFFAVGMGPGKWSPDLRKTYNLLDAVSRHTIQVYPRSWSAVMLTFDNAGMWNLRSNLWERYYMGEQLYVSCTSPARSLRDEYNMPENGLRCGKIVGLPLPAPYIIA

SEQ ID NO: 913 - protein, 77 aa, Olea Europaea
IQVYPRSWSAVMLTFDNAGMWNVRSNIWERHYLGEQVYVSVISPERSLRDEYNMPENALRCGKVIGLPLPPSYNPAR

SEQ ID NO: 914 - protein, 72 aa, Olea Europaea
PRINCSSNNNIVVNVFNQLDQPLLFTWNGMQHRKNSWMDGLPGTNCPIAPGTNFTYKWQPKDQIGSFFYFPS

SEQ ID NO: 915 - protein, 302 aa, Olea Europaea
GANLFHSARRPLILMATTMRGTAATAGGVLLLALLVLSTTQVARAEDPYLFFEWHVTYGTRTLLGVPQKVILINDEFPGPRINCSSNNNIVVNVFNQLEEPLLFTWNGMQQRKNSWQDGLPGTNCPVAPGTNYTYKWQPKDQIGSFFYFPSIGMQRAVGGYGLISVVSRLLIPVPFDPPADDLQVLIGDWYTKDHAVMASLLDAGKSFGRPAGVLINGRGGKDATNPPMFTFEAGKTYRLRVCNVGIKSSLNFRIQGHDMKLVEMEGSHTLQNTYDSLDVHVGHCLSVLVDADQKPADYLMV

SEQ ID NO: 916 - protein, 128 aa, Plantago Lanceolata
DQVFKYNQMGDSPPGVNGPMHITPNVITAEFRTFIEVVFENPEKSMDSLHLDGYAFFAVGMGPGKWKPELRKTYNLLDAVSRHSIQVYPRSWSAVMLTFDNAGMWNLRSNLWERYYMGEQLYVSCTSP

SEQ ID NO: 917 - protein, 196 aa, Plantago Lanceolata
LILMATTMRGTAATAGGVLLLALLVLSTTQVARAEDPYLFFEWHVTYGTRTLLGVPQKVILINDEFPGPRINCSSNNNIVVNVFNQLEEPLLFTWNGIQHRKNSWQDGLPGTNCPVAPGTNYTYKWQPKDQIGSFFYFPSIGMQRAVGGYGLISVVSRLLIPVPFDPPADDHVVLIGDWYTKDHEVMARLLDSGRS

SEQ ID NO: 918 - protein, 564 aa, Poa Pratensis
RSPPILMATTMRATAAAAILLLALLLLSTTNVARAEDPYVFFEWHVTYGTKNLLGVPQKVILINGEFPGPRINCSSNNNIVVNVFNQLDQPLLFTWNGIQHRKNSWQDGLPGTNCPVAPGTNYTYKWQPKDQIGSFFYFPSIGMQRAVGGYGLISVVSRLLIPVPFDPPADDLQVLIGDWYTKDHAVMASLLDAGKSFGRPAGVLINGRGGKDATNPPMFTFEAGKTYRLRVCNVGIKASLNFRIQGHDMRLVEMDGSHTLQDSYDSLDVHVGHCLSVLVDADQKPADYLMVASTRFIVDASSVSAVIRYVGSNTPPAPNVPEPPAGWAWSLNQWRSFRWNLTASAARPNPQGSYHYGQINITRTIKLMITRGHLDGKLKYGFNGVSHVDADTPLKLAEYFNVSDQVFKYNQMGDSPPGVNGPMHITPNVITAEFRTFIEVVFENPEKSMDSLHLDGYAFFAVGMGPGKWKPELRKTYNLLDAVSRHSIQVYPRSWSAVMLTFDNAGMWNVRSNLWERHYLGEQLYISVISPARSLRDEYNFPENALRCGKVVGLPLPPSYLPA

SEQ ID NO: 919 - protein, 70 aa, Quercus Alba
ELRKTYNLLDAVSRHTIQVYPRSWTAIMLTFDNAGMWNVRSNIWERHYLGEQVYVSVISPERSLRDEYNM

SEQ ID NO: 920 - protein, 247 aa, Quercus Alba
TTQVARAEDPYLFFEWHVTYGTRTLLGVPQKVILINDEFPGPRINCSSNNNIVVNVFNQLEEPLLFTWNGIQHRKNSWQDGLPGTNCPVAPGTNYTFKWQAKDQIGSFFYFPSLGMQRAAGGYGMISVVSRLLIPVPFDPPADDFQVLVGDWYTKDHTVMASLLDAGKSPGRPAGVLINGKGGQDAASQPMFTFEAGKTYRLRVCNVGIKSSLNFRIQGHDMKLVEMEGSHTLQNTYDSLDVHVGQC

SEQ ID NO: 921 - protein, 246 aa, Ambrosia Artemisiifolia
PTMDKEELVQRAKLAEQAERYDDMAQAMKQVTETGVELTNEERNLLSVAYKNVVGARRSSWRVISSIEQKTEGVERKQQMAREYRERVEKELREICYDVLGLLDKYLIPKASNAESKVFYLKMKGDYYRYLAEVATGDQKTSVVEESQKAYQEAFDVSKGKMQPTHPIRLGLALNFSVFYYEILNSPDRACQLAKQAFDDAIAELDTLNEDSYKDSTLIMQLLRDNLTLWTSDTQGDGDEPQEGGD

SEQ ID NO: 922 - protein, 96 aa, Ambrosia Artemisiifolia
AQDIANADLPPTHPIRLGLALNFSVFYYEILNSPDRACNLAKQAFDEAIAELDTLGEDSYKDSTLIMQLLRDNLTLWTSDMQEDGADEIKEASSKQ

SEQ ID NO: 923 - protein, 258 aa, Ambrosia Psilostachya
MSNNDKDRETHVYMAKLSEQAERYEEMVECMKSVAKLNVELTVEERNLLSVGYKNVIGARRASWRIMSSIEQKEESKGNESNVTLIKGYCKKVEDELSKICSDILEIIDKHLIPSSGSGEATVFYHKMKGDYYRYLAEFKTDQERKDAAEQSLKGYEAAAAAANTELPSTHPIRLGLALNFSVFYYEIMNSPERACHLAKQAFDEAIADLDSLSEESYKDSTLIMQLLRDNLTLWTSDLPEDAGDENQPKGEEPKPAE

SEQ ID NO: 924 - protein, 71 aa, Ambrosia Psilostachya
DSKVFYLKMKGDYHRYLAEFKTGAERKEAAESTLNAYKAAQDIANAELAPTHPIRLGLALNFSVFYYEILN

SEQ ID NO: 925 - protein, 72 aa, Ambrosia Psilostachya
VFYYEILNSPDRACNLAKQAFDEAISELDSLGEESYKDSTLIMQLLRDNLTLWTSDTNEDGGDEIKEAPAPK

SEQ ID NO: 926 - protein, 253 aa, Betula Verrucosa
MAVTPSAREENVYMAKLAEQAERYEEMVEFMEKVTAAVESEELSVEERNLLSVAYKNVIGARRASWRIISSIEQKEESRGNEDHVATIRDYRSKIETELSNICDGILKLLDTRLIPSASSGDSKVFYLKMKGDYHRYLAEFKTGADRKEAAESTLTAYKAAQDIANTELAPTHPIRLGLALNFSVFHYEILNSPDRACNLAKQAFDEAIAELDTLGEESYKDSTLIMQLLRDNLTLWSSDMQDDGADEIKEAP

SEQ ID NO: 927 - protein, 264 aa, Cynodon Dactylon
MSPSEPTREESVYMAKLAEQAERYEEMVEFMERVARSAGGAGGGEELSVEERNLLSVAYKNVIGARRASWRIISSIEQKEEGRGNEAHAASIRAYRSKIEAELARICDGILALLDSHLVPSAGAAESKVFYLKMKGDYHRYLAEFKSGTERKEAAESTMNAYKAAQDIALADLAPTHPIRLGLALNFSVFYYEILNSPDRACNLAKQAFDEAISELDSLGEESYKDSTLIMQLLRDNLTLWTSDTNEDGGDEIKEAAAPKESGD

SEQ ID NO: 928 - protein, 259 aa, Quercus Alba
MSPTDSSREENVYMAKLAEQAERYEEMVEFMEKVAKTVDVEELTVEERNLLSVAYKNVIGARRASWRIISSIEQKEESRGNEDHVVIIKEYRGKIENELSKICDGILGLLETHLIPSASAAESKVFYLKMKGDYHRYLAEFKTGAERKEAAESTLLAYKSAQDIALAELPPTHPIRLGLALNFSVFYYEILNSPDRACNLAKQAFDEAISELDTLGEESYKDSTLIMQLLRDNLTLWTSDITDDAGDEIKEASKRESGE

SEQ ID NO: 929 - protein, 120 aa, Betula Verrucosa
ALGCDGSVLIDSTLSNTAEKDSPANNPSLRGFEVIDNAKAKLEAICKGVVSCADIVAFAARDSIEITGGLGYDVPAGRRDGIVSLASETLTNLPPPTFNVDQLTQLFANKGFTQEEMVTL

SEQ ID NO: 930 - protein, 68 aa, Betula Verrucosa
GCDASILIDSTNKKPSEKDASPNQTIRGYEVIDKAKKRLEVTCPSTSCADIITLAVRDAVALAGGPNY

SEQ ID NO: 931 - protein, 358 aa, Cynodon Dactylon
MDARMVFPLFLVAVAAAPLASGQLSPDFYKTTCPDAEKIIFGVVEKRFKEDPGTAAGLLRLVFHDCFANGCDASILIDPLSNQASEKEAGPNISVKGYDVIDDIKTELEKKCPEVVSCADIVAVSARDAVKLTGGPAYEVPTGRRDAVVSNREDADNLPGPDIAVPKLLSDFSKKGFDVEEAVALLAGGHTIGSCKCFFIEADAAPIDPEYKKNISAACDGANRDRGSVPLDQITPNVFDGNYFALALAKKMPLTVDRLMGMDPKTEPVLKAMAAKPESFVPIFAKAMEKISALQVLTGKDGEIRKSCGEFNNPKPTSDGPSVIRISSLNPDHMGLSGPGARKVGGRADGMKANGAED

SEQ ID NO: 932 - protein, 73 aa, Quercus Alba
LSNQASEKEAGPNISVKGYDVIDDIKTELEKKCPEVVSCADIVAVSARDAVKLTGGPAYEVPTGRRDAVVSNR

SEQ ID NO: 933 - protein, 68 aa, Ambrosia Psilostachya
ERIHDANLTLHVGVLKNEFMNFGFDYFADPMVEIATYYSLLFCDGLVTEFPATAAAYFRSPCSDTSKN

SEQ ID NO: 934 - protein, 116 aa, Ambrosia Psilostachya
AFCLGSADLTTSTTAATTFMAKVVTVSEIQNKSGIFSFDLSWSEIQTLKPDLSGPYAQAGLKRNPAAKNAGKFLTLSEFLELAKSSNVSGIMIEIEDAPYLATRGLGVVDAISSAL

SEQ ID NO: 935 - protein, 532 aa, Anthoxanthum Odoratum
EITLTKSYGDIAKDLSIIKPFASGIMVPKHFIQPLNKEDYLLPYTTLVKDARALGLEVFAAGFNNDMLTSYNYSYDPAAEYLQFIDNPDFSVDGVLTDFTPTASGAVACLAHTKGNALLPTAKALLPTENGERPLIITHNGASGVFPGCTDLAYQQAVRDGADIIDCAVRMTKDGVAFCLGSADLTTSTTAATTFMTKVVTVSEIQNRSGIFSFDLSWSEIQTLKPDLSGPYAQAGLKRNPAAKNAGKFLTLSEFLELAKSSNVSGIMIEIEDAPYLATRGLGVVDAVSSALVNASYDKESNHQRVLIQSDDSSVLSVFKKFPKFERILVIEPIISDASKPSIDEIKEFAHTVMVSRGSLVQVNGFFLTAFSDLAERIHDANLTLHVGVLKNEFMNFGFDYFADPMVEIATYYSLLFCDGLVTEFPATAAAYFRSPCSDTSKNLSYTILAANPGALEQMVPLGALPPALPPAPVLEPADVIDPPLPPVAVSSPPESTPNGDDQPSGASSNAGNCRLLVAGIAAAFLYLMSSH

SEQ ID NO: 936 - protein, 770 aa, Anthoxanthum Odoratum
IFTKRTAVCSSRMGSRYPLLFLILLLVHGANALPPVPEWLTLTGRRPLVIARGGFSGVFPDSSNLAFSNAVTYSLPDVVLFCDLQFSSDGVGFCLSNLNLDNSTLISKNEGFASRGSTYQVNGQDIQGWFSLDFKAEELHNIPLIQNTLSRSQIFDGVPYLLSLDNVVKTVQPHEIWINVQYDSFLREHGLSSEDYILGLPKEFPVTWVSSPEVALLKSLSGKLRNNTKLIFRFLSEDLVEPTTKKTYGELLKDLKSITTFASGILVPKQFIWPMNKDMYLDPATSLVEDAHAIGLEVYASGFANDDSCISHNYSYDPSKEYLQFIDNSDFSVDGVLTDYPPTASAAVACLAHTKGNALAPPGTDTPGGGRPLIITHNGASGVFSDSTDLAYQQAVKDGADIIDCWVRMTKDGVAFCLGSLDLNSSTTAATSFLGKMTTVNEIQNKSGIFSFDLTWNEIQTLKPNLIGPFSEASLDRNPAAKNAGKFMTLAGFLDYAKASNISGILIGIEHAAFLETRGHDVVATVSNALIKSGYDKETKKCVLIQSEDPPVLSAFKKFPKFKRVFEIEFDIGDVSQPSVVQILEFANAVKLRRSSAARVDGFFLTGFTDALVDRLHAANIAVYVGVLKNEYMSLAFDYWADPMVEIATDTWAVGADGLVTEFPATAAAYFRSPCSDTSKNLSYTILAANPGALEQMVPLGALPPALPPAPVLEPADVIDPPLPPVAVSSPPESTPNGDDQPSGASSNAGNCRLLVAGIAAAFLYLMSSH

SEQ ID NO: 937 - protein, 143 aa, Cynodon Dactylon
LKNEFMNFGFDYFADPMVEIATYYSLLFCDGLVTEFPATAAAYFRSPCSDTSKNLSYTILAANPGALEQMVPLGALPPALPPAPVLEPADVIDPPLPPVAVSSPPESTPNGDDQPSGASSNAGNCRLLVAGIAAAFLYLMSSH

SEQ ID NO: 938 - protein, 783 aa, Cynodon Dactylon
PRWGRRKAFPSFVLGVSCEGAPPDQMGASNPHMFLILLLLLHGASAAPNAPLPKWRTLSGRPPLVIAHGGFSGLFPDSSQFAYQFAMSTSLPDVALFCDLQFSSDGMGFCKSGLTLDNSTIISEVFPKMEKTYKVNGEDVRGWFSLDFTADQLVQNVTLIQNIFSRPSTFDGALGMYMVDDVVELRPPHIWLNVEYHSFFLEHKISTEDYLKALPKEFSFSYISSPEVAFLKSVGGLLKQSKTKFVFRLLNENVVEPSTKKTYGELAKDLKFIKEFASGILVPKTYIWPLNKDQYLAPSTSLVKDAHALGLEVYASGFANDVGLSYNYSYDPSAEYLQFIDNPDFAVDGLLTDFPPTASGAVACLAHSKGNPLPPPQRPRPLIISHNGASGVFPGSTDLAYQQAMKDGTDIIDCTVQMSKDGVAFCMPSADLGSCTTAGISFINKGSTVHEIQNKSGIFSFDLSWSEIQTLKPDLVGPFAQAGLKRNPVAKNAGKFMTLPGFLDMAKASNVSGILINIEHAAYLATKGLGVVDAVTGALTKAGYDKETKQQVLIQSEDSSVLSAFKKSFPASKRVLSIDTEISDVAKPSVDDIKGVADGVRIHRSSVAQVTGYFLTHFTHVVDTLHAANLTVFIGVLKNEFMNLGFDYFADPMVEIVTYSDAVMADGLITEFPATAAAYFKSPCSDMNLNLSYSILPAQPGALVNIAVPGALPPVGAPAPLLEPADVLDPPLPPVRAVSTAAAPAPTGAADNTTSAASTTAGNRSSSLLVAGIVALLSLSFLQ

SEQ ID NO: 939 - protein, 210 aa, Fraxinus Excelsior
DLAYRQAMKDGADIIDCTVQMSKDGVAFCMPSADLGSCTTAGISFINKGSTVHEIQNKSGIFSFDLSWSEIQTLKPDLVGPFAQAGLKRNPVAKNAGKFMTLPGFLDMAKASNVSGILINIEHAAYLATKGLGVVDAVTGALTKAGYDKETKQQVLIQSEDSSVLSAFKKSFPASKRVLSIDTEISDVAKPSVDDIKGVADGVRIHRSSV

SEQ ID NO: 940 - protein, 211 aa, Fraxinus Excelsior
NAGKLLTLPQFLDLAKTSNVSGILIDIEDAPYLATRGLGVVDAVSSALVNASYDKESNQQKVYIQSDDSSVLSVFKKFPRFQRVLVIDPVISDASKPSIDEIKEFADIVMVSRGSLVRVNGFFLTGYNDLVEKIHNANLTLHVGVLKNEFMNFGFDYFADPMVEIATYSSALVADGIVTEFPATAAAYFKSPCSDPSKNVSYTINAAQPGA

SEQ ID NO: 941 - protein, 167 aa, Fraxinus Excelsior
FFLTAFSDLAERIHDANLTLHVGVLKNEFMNFGFDYFADPMVEIATYYSLLFCDGLVTEFPATAAAYFRSPCSDTSKNLSYTILAANPGALEQMVPLGALPPALPPAPVLEPADVIDPPLPPVAVSSPPESTPNGDDQPSGASSNAGNCRLLVAGIAAAFLYLMSSH

SEQ ID NO: 942 - protein, 234 aa, Lollium Perenne
LVKDAHALGLEVYASGFANDDACMSHNYSYDPNAEYLNFIDNSDFSVDGFLTDYPPTASGAIACLAHTKGNALASIGNETTDGSRPLIITHDGASGVFPGSTDLAYQQAVKDGADIIDCWVRMSKDGVAFCLGSSDLNGSTTAATTFLGKMTNVDEIQNKSGIFSFDLSWNEIQTLKPNLIGPFSESAMDRNPAAKNAGKFMTLAAFLDYAKASNISGILIGIEGAAYLATRGL

SEQ ID NO: 943 - protein, 238 aa, Lollium Perenne
YLATRGLDVVGAVSTALTKFGYDKETKQVVLIQSEDPPVLSAFKKFPKFKRVYEIEFDITDISKPSVVEISEMANAVKLRRSSAVQVDGFYLTGFTHALVDRLHAAKIEVYVGVLKNEFMSLAFDYWADPMKEIATDTWAVPADGLITDFPATAAAYFRSPCSDMEQNMSYYTISPAEVGTLVRMASYGLPPAPPPAPVLEPEDVHHQPLPLCPKEPMFRTFRCRMPPKGEYTMATDG

SEQ ID NO: 944 - protein, 314 aa, Lollium Perenne
QFIDNPDFAVDGLLTDFPPTASGAVACLAHSKGNPLPPPQRPRPLIISHNGASGVFPGSTDLAYQQAMKDGTDIIDCTVQMSKDGVAFCMPSADLGSCTTAGTSFINKGSTVHEIQNKSGIFSFDLSWSEIQTLKPDLVGPFAQAGLKRNPVAKNAGKFMTLPGFLDMAKASNVSGILINIEHAAYLATKGLGVVDAVTGALTKAGYDKETKQQVLIQSEDSSVLSAFKKSFPASKRVLSIDTEISDVAKPSVDDIKGVADGVRIHRSSVAQVTGYFLTHFTHVVDTLHAANLTVFIGVLKNEFMNLGFDYFAD

SEQ ID NO: 945 - protein, 757 aa, Lollium Perenne
MGGRYPHMLLILILLHAANAALDEPVDKWKTLGGTPPLVIARGGFSGLFPESSPAAYQFAISTALPGVILHCDLQLSSDAKGFCRSGVRLDKSTLIEDIYPNRDKTYKIGPEDVHAWFSVDFTEAELLNVTVKQTIYSRPSTFDGVMPMYRLEDVASLEPDGIWVNVEYNSFYKEHKISTEDFLLALPKEFPITYISSPDISFLKSIGGKLKGNTKLILRSLWENATEPTLLKSYGDIMKDLSIIKPFASGILVPRHFIWPTNKDEYLLPSTSLVKDAHALGLEVYAAGFANDIFTSYNYSYDPAAEYLQFIDNPDFSVDGVLTDFTPTASGAIACLAHTKGNALLPIAKPLLATENGERPLIITHNGASGVFSGCTDLAYQQAVRDGADILDCSVRMTKDGVAFCLGSADLTTSTTAATTFMAKVVTVSEIQNKSGIFSFDLSWSEIQTLKPELNGPYAQAGLKRNPAAKNAGKFWSLSEFLDFAKTSNVSGVLIEIEDAPYLATRGLGVVDAISSALVNASYDKESHQQRVLIQSDDSSVLSVFKKFPKFERVFVIDPVISDASKPSIDEIKEFAHTVMVSRGALVRAHGFFLTGFNDMLVGKIHDANLTLHVGVLKNEFMNIGFDYFADPMVEIVTYYMGLVCDGIVTEFPATAAAYFRSPCSDLTKNMSYSILAANPGGLEKMVPLGALPPALPPAPVLEPADVIDPPLPPVAVSSPPESTPEGDEDASAASSNAANCLLVAGIAAFLYLSSH

SEQ ID NO: 946 - protein, 164 aa, Olea Europaea
PPPQRPRPLIISHNGASGVFPGSTDLAYQQAMKDGTDIIDCTVQMSKDGVAFCMPSADLGSCTTAGISFINKGSTVHEIQNKSGIFSFDLSWSEIQTLKPDLVGPFAQAGLKRNPVAKNAGKFMTLPGFLDMAKASNVSGILINIEHAAYLATKGLGVVDAVTG

SEQ ID NO: 947 - protein, 83 aa, Olea Europaea
VGVLKNEFMNFGFDYFADPMVEIATYYSLLFCDGLVTEFPATAAAYFRSPCSDLTKNMSYSILAANPGGLEKMVPLGALPPAL

SEQ ID NO: 948 - protein, 101 aa, Olea Europaea
AQAGLKRNPAAKNAGKFWSLSEFLDFAKTSNVSGVLIEIEDAPYLATRGLGVVDAISSALVNASYDKESHQQRVLIQSDDSSVLSVFKKFPKFERVFVIDP

SEQ ID NO: 949 - protein, 78 aa, Plantago Lanceolata
PSVDDIKGVADGVRIHRSSVAQVTGYFLTHFTHVVDTLHAANLTVFIGVLKNEFMNLGFDYFADPMVEIVTYSDAVMA

SEQ ID NO: 950 - protein, 173 aa, Plantago Lanceolata
VRAHGFFLTGFNDMLVGKIHDANLTLHVGVLKNEFMNIGFDYFADPMVEIVTYYMGLVCDGIVTEFPATAAAYFRSPCSDLTKNMSYSILAANPGGLEKMVPLGALPPALPPAPVLEPADVIDPPLPPVAVSSPPESTPNGDDQPSGASSNAGNCRLLVAGIAAAFLYLMSSH

SEQ ID NO: 951 - protein, 314 aa, Poa Pratensis
QFIDNPDFAVDGLLTDFPPTASGAVACLAHSKGNPLPPPQRPRPLIISHNGASGVFPGSTDLAYQQAMKDGTDIIDCTVQMSKDGVAFCMPSADLGSCTTAGISFINKGSTVHEIQNKSGIFSFDLSWSEIQTLKPDLVGPFAQAGLKRNPVAKNAGKFMTLPGFLDMAKASNVSGILINIEHAAYLATKGLGVVDAVTGALTKAGYDKETKQQVLIQSEDSSVLSAFKKSFPASKRVLSIDTEISDVAKPSVDDIKGVADGVRIHRSSVAQVTGYFLTHFTHVVDTLHAANLTVFIGVLKNEFMNLGFDYFAD

SEQ ID NO: 952 - protein, 302 aa, Poa Pratensis
SEIQTLKPNLIGPFSASGLDRNPAAKNAGKFMTLAGFLDYAKASNITGILIGIEHSAYLATRGLDVVDAVSSALIKSAYDKETKQRVFIQSEDPPVLSAFKKIPKFMRVFEIEFDIRDVSQPSVVEISEFANAVKLRRSSATQADGYYLTGFTTALVQRLHAANILVYVGVLKNEFMSLAFDYWADPMVEIATDTWSVFADGLVTEFPATAAAYFRSPCSNMERNLSYTIRPASPGILLDLAAYGALPPAPPPAPVLEPADIHRQPLPLCPTEPMFRTFRCRLAPKATGKSAEYTANLASDG

SEQ ID NO: 953 - protein, 222 aa, Poa Pratensis
SEIQTLKPNLIGPFSASGLDRNPAAKNAGKFMTLAGFLDYAKASNITGILIGIEHSAYLATRGLDVVDAVSSALIKSAYDKETKQRVFIQSEDPPVLSAFKNIPKSNRVFEIEFDIGDVSQPSVVEITKFANVVKLRRSSAAKVDGFYLTGFTDAVKRLKDAKIEVHVGVLKNEFMSLAFDYWADPMVEIATDTWSVFADGLVTEFPATAAAYFRSPCSDMT

SEQ ID NO: 954 - protein, 302 aa, Poa Pratensis
SEIQTLKPNLIGPFSASGLDRNPAAKNAGKFMTLAGFLDYAKASNITGILIGIEHSAYLATRGLDVVDAVSSALIKSAYDKETKQRVFIQSEDPPVLSAFKKIPKFMRVFEIEFDIRDVSQPSVVEISEFANAVKLRRSSATQADGYYLTGFTTALVQRLHAANILVYVGVLKNEFMSLAFDYWADPMVEIATDTWSVFADGLVTEFPATAAAYFRSPCSNMERNLSYTIRPASPGILLDLAAYGALPPAPPPAPVLEPTDVHRQPLPLCPTEPIFRTFRCRLPPKETGKNPEYTGSLAANG

SEQ ID NO: 955 - protein, 121 aa, Quercus Alba
VADGVRIHRSSVAQVTGYFLTHFTHVVDTLHAANLTVFIGVLKNEFMNLGFDYFADPMVEIVTYSDAVMADGLITEFPATAAAYFKSPCSDMNLNLSYSILPAQPGALVNIAVPGALPPVG

SEQ ID NO: 956 - protein, 142 aa, Quercus Alba
KNEFMNIGFDYFADPMVEIVTYYMGLVCDGIVTEFPATAAAYFRSPCSDTSKNLSYTILAANPGALEQMVPLGALPPALPPAPVLEPADVIDPPLPPVAVSSPPESTPNGDDQPSGASSNAGNCRLLVAGIAAAFLYLMSSH

SEQ ID NO: 957 - protein, 234 aa, Quercus Alba
TAKALLPTENGERPLIITHNGASGVFPGCTDLAYQQAVRDGADIIDCAVRMTKDGVAFCLGSADLTTSTTAATTFMAKVVTVSEIQNKSGIFSFDLSWSEIQTLKPDLNGPYAQAGLKRNPAAKNAGKFWSLSEFLDFAKTSNVSGVLIEIEDAPYLATRGLGVVDAISSALVNASYDKESHQQRVLIQSDDSSVLSVFKKFPKFERILVIEPIISDASKPSIDEIKEFADIVM

SEQ ID NO: 958 - protein, 95 aa, Quercus Alba
IQTLKPDLVGPFAQAGLKRNPVAKNAGKFMTLPGFLDMAKASNVSGILINIEHAAYLATKGLGVVDAVTGALTKAGYDKETKQQVLIQSEDSSVL

SEQ ID NO: 959 - protein, 279 aa, Ambrosia Artemisiifolia
ELLEFPNKDNRRLLHAVYRVGDLDRSIKFYTEAFGMKLLRKRDVPEEKYSNAFLGFGPEDSNFAVELTYNYGVDKYDIGTGFGHFAIATADVYKLAQDIKAKGGTITREAGPVKGGTSVIAFAKDPDGYLFELIERPNTPEPLCQVMLRVGDLDRSIKFYEKALGMKLCRKIDRPEQKYTLAMMGYAEEKETTVLELTYNYGVTEYTKGNAYAQVAVSTSDVYKSAQVVNHVIQELGGKITRQAGPLPGLGTKIVSFLDPDGWKTVLVDHEDFLKELHN

SEQ ID NO: 960 - protein, 285 aa, Ambrosia Psilostachya
MAETLSAELLEFPNKDNRRLLHAVYRVGDLDRSIKFYTEAFGMKLLRKRDVPEEKYSNAFLGFGPEDSNFAVELTYNYGVDKYDIGTGFGHFAIATADVYKLAQDIKAKGGTITREAGPVKGGTSVIAFAKDPDGYLFELIERPNTPEPLCQVMLRVGDLDRSIKFYEKALGMKLCRKIDRPEQKYTLAMMGYAEEKETTVLELTYNYGVTEYTKGNAYAQVAVSTSDVYKSAQVVNHVIQELGGKITRQAGPLPGLGTKIVSFLDPDGWKTVLVDHEDFLKELH

SEQ ID NO: 961 - protein, 131 aa, Ambrosia Psilostachya
CQVMLRVGDLDRSIAFHEKAFGMELLRRKDNPDYKYTIAMMGYGPEDKNAVLELTYNYGVTEYDKGNAYAQIAIGTDDVYKTAEAIKVFGGKITREPGPLPGISTKITACLDPDGWKTVFVDNVDFLKELE

SEQ ID NO: 962 - protein, 358 aa, Betula Verrucosa
MVRILPMASTIRPSLSSLKLPLLRFALSPHSPSRRLSMMHLGSAVPQSQFFGLKAVKLLRGEGNSMVVAAAGNAAQASTAATQENVLEWVKKDKRRMLHVVYRVGDLDRTIKFYTECLGMKLLRKRDIPEERYTNAFLGYGPEDSHFVIELTYNYGVDKYDIGTAFGHFGIAVEDVAKTVELIKAKGGKVTREPGPVKGGTTVIAFIEDFDGYKFELLERGPTPEPLCQVMLRVGDLDRSINFYEKAFGMELLRKRDNPEYKYTIAMMGYGPEDKSAVLELTYNYGVTEYEKGNAYAQIAIGTDDVYKTAEAIKLSGGKITREPGPLPGISTKITACLDPDGWKAVFVDNVDFLKELE

SEQ ID NO: 963 - protein, 289 aa, Betula Verrucosa
MAEAAHVAPNAELLEWPKKDKRRFLHVVYRVGDLDRTIKFYTESFGMKLLRKRDIPEEKYSNAFLGFGPEQSNFVVELTYNYGVPSYDIGTGFGHFAISTPDVYKLVEDIRAGGGNVTREPGPVKGGQSVIAFVKDPDGYTFELIQRGPTPEPLCQVMLRVGDLDRAIKFYEKALGMRLLKKVDRPEYKYTIAMLGYAEEHETTVLELTYNYGVTEYTKGNAYAQIAIGTDDVYKSGEVVNLVIQELGGKITRQPGPIPGLNTKITSFLDPDGWKTVLVDNEDFLKELE

SEQ ID NO: 964 - protein, 77 aa, Cynodon Dactylon
GVTEYSKGNAYAQVAIGTNDVYKSAEAVDLATKELGGKILRQPGPLPGINTKIASFVDPDGWKVVLVDHADFLKELQ

SEQ ID NO: 965 - protein, 345 aa, Cynodon Dactylon
MRAFPATAGRGAVACAAAAPVPRRSLLLSTAAAGATLHSDSLRLATRSASGAGAIGASADAAKAATFAGKDEAVAWAKSDNRRLLHVVYRVGDLDRTIKFYTECLGMKLLRKRDIPEDKYSNAFLGYGPEDSHFVVELTYNYGVDKYDIGEGFGHFGIAVDDVAKTVEFIRAKGGKVTREPGPVKGGKTVIAFVEDPDGYKFEILERPGTPEPLCQVMLRVGDLDRAISFYEKACGMELLRKRDNPEYKYTVAMLGYGPEDKNAVLELTYNYGVTEYAKGNAYGQIAIGTDDVYKTAEVAKLFGGQVVREPGPLPGINTKITSILDPDGWKSVFVDNIDFAKELE

SEQ ID NO: 966 - protein, 167 aa, Cynodon Dactylon
EPGPVKGGKSVIAFVEDPDGYKFELIERGPTPEPLCQVMLRVGDLDRAINFYEKAFGMELLRKRDNPQYKYTIAMMGYGPEDKNAVLELTYNYGVTEYDKGNAYAQIAISTDDVYKTAEVVRLNAGHITREPGPLPGINTKITACTDPDGWKTVFVDNIDFLKELEE

SEQ ID NO: 967 - protein, 264 aa, Cynodon Dactylon
MARLLLPLPFAAAAAASSSLHLAASRLRVPSVSVTRREGLFGGRLAGVSVPARLARRGLSAGAEAGGGSAAQVVGPEEAMEWVKKDRRRLLHVVYRVGDLDKTIKFYTECLGMKLLRKRDIPEERYTNAFLGYGPEDSHFVVELTYNYGVESYNIGTGFGHFGIAVEDVAKTVDLIKAKGGTVTREPGPVKGGKSVIAFVEDPDGYKFELIERGPTPEPLCQVMLRVGDLDRAINFYEKAFGMELLRKQDNPQYKKEYVLLTYY

SEQ ID NO: 968 - protein, 73 aa, Cynodon Dactylon
MATGSEAVLEWNKQDKKRMLHAVYRVGDLDRTIKCYTECFGMKLLRKRDVPDEKYTNAFLGFGPEDKNFALEL

SEQ ID NO: 969 - protein, 131 aa, Cynodon Dactylon
ELTYNYGVDKYEIGEGFGHFAIATEDISKLAEAVKSSCCCKITREPGPVKGGSTVIAFAQDPDGYMFELIQRGPTPEPLCQVMLRVGDLERSIKFYEKALGMRLLRKKDVPEYKYTIAMLGYDDEDKTTVL

SEQ ID NO: 970 - protein, 207 aa, Quercus Alba
SSYDIGTGFGHFAIATPDVYKLVEDIRAKGGVVTREPGPVKGGQSVIAFVKDPDGYVFELIQRGPTPEPLCQVMLRVGDLDRSIKFYEQALGMRVVKKVDRPEYKYTLAMLGYAEEHETTVLELTYNYGVTEYTKGNAYAQIAIGTDDVYKSAEVVNLVTQELGGKITRQPGPIPGLNTKITSFLDPDGWKTVLVDNEDFLKELHKE

SEQ ID NO: 971 - protein, 158 aa, Quercus Alba
MAEAHAAPNAELLEWPKKDKRRFLHVVYRVGDLDRTIKFYTECFGMKLLRKRDIPEEKYSNAFLGFGSEETNFVVELTYNYGVTEYTKGNAYAQIAIGTDDVYKSAEVVNLVTQELGGKITRQPGPIPGLNTKITSFLDPDGWKTVLVDNEDFLKELH

SEQ ID NO: 972 - protein, 185 aa, Quercus Alba
EDVAKTVELVKAKGGKVTREPGPVKGGSTVIAFVEDPDGYKFELLERGPTPEPLCQVMLRVGDLDRSINFYEKAFGLELLRKRDNPEYKYTIAMMGYGPEDKNVVLELTYNYGVTEYDKGNAYAQIAIGTDDVYKTAEAIKLSGGKITREPGPLPGINTKITACLDPDGWKTVFVDNVDFIKELE

SEQ ID NO: 973 - protein, 115 aa, Quercus Alba
MGVAAAGNAAQASTTATQENVLEWVKKDKRRMLHVVYRVGDLDRTIKFYTECLGMKLLRKRDIPEERYTNAFLGYGPEDSHFVIELTYNYGVDKYDIGTGFGHFGIAVEDVAKTV

SEQ ID NO: 974 - protein, 295 aa, Ambrosia Artemisiifolia
RAERIVAEVVQAKQMMNPTTAAGVLRVFFHDCFVSGCDASVLIASTQFQKSEHDAEINHSLPGDAFDAVVRAKLALELECPGVVSCADILALASGVLVTMTGGPRYPIPLGRKDSLSSSPKDPDVELPHSNFTVDRLIQMFGAKGFTVQELVALSGAHTLGFSHCKEFADRLYNFRSKGGKPEPFDPSMNPSYARGLKDVCKDYLKDPTIAAFNDIMTPGKFDNMYFVNLERGLGLLSTDEELWTDPRTKPLVQLYASNPTAFFTDFGKAMEKLSLFGVKTGKDGEVRRRCDAYN

SEQ ID NO: 975 - protein, 241 aa, Ambrosia Psilostachya
AERDADINLSLPGDAFDIVTRIKTALELECPGVVSCSDILAIAARNLIKMTGGPKIDVLFGRKDGLVSQASRVKGNLALPNMTMTHIINMFKLKGFTVQEMVALVGAHTIGFSHCKEFSSRIFSYSKTQPVDPKMNPKYADGLKRLCANYTKDHTMAAFNDVITPGKFDNMYYKNLQRGLGLLATDQAMADDPRTKPIVDLYAENEDAFFNDFAKAMQKVSMLDIKTDKNGEVRHRCDTFN

SEQ ID NO: 976 - protein, 249 aa, Ambrosia Psilostachya
HGIAERDADINLSLPGDAFDIVTRIKTALELECPGVVSCSDILAIAARNLIKMTGGPKIDVLFGRKDGLVSQASRVKGNLALPNMTMTHIINMFKLKGFTVQEMVALVGAHTIGFSHCKEFSSRIFSYSKTQPVDPKMNPKYADGLKRLCANYTKDHTMAAFNDVITPGKFDNMYYKNLQRGLGLLATDQAMADDPRTKPIVDLYAENEDAFFNDFAKAMQKVSMLDIKTDKNGEVRHRCDTFNQQSGT

SEQ ID NO: 977 - protein, 432 aa, Anthoxanthum Odoratum
PGHSFPPFAPLHRLHENIVSNSPTLPSPSHFLDSHAPRRSSRRLLATSLQLGGTYRINPRASHTHAGSTYQAAAMRRQSLLLLLAAATLLAATVSAQPGPTQPGPAQPVPTLPGPGPVPTLSPDFYSQTCPRAERIIAEVVQSKQMANPTTAAGVLRVFFHDCFVTGCDASVLIAPTRFAKSEKDAEINHSLPGDAFDAVVRAKLALELECPGVVSCADILALASRVLVTMTGGPRYPIPLGRKDSLSSSPTAPDVELPHGNFTVGKIIELFLAKGFSIQEMVALSGAHTLGFSHCQEFASRLYNYRDNGGKPAPFDPSMNPTYAKGLQAACQDYQKDPTIAAFNDIMTPGKFDNMYYINLQRGLGLLSTDEELWSDLRTKPFVQRYAANNTDFFEDFSKAMEKLSLYGVKTGAEGEIRRRCDAYNSGPITV

SEQ ID NO: 978 - protein, 322 aa, Betula Verrucosa
MAFPLLFILFLSIPFSEADLLSIDYYKKTCPDFDRIIRETVTSKQITNPTTAAGTLRAFFHDCVVNGCDASVLISSNSFNKAERDADLNLSLSGDAFDLIVRAKTALELACPNIVSCSDILAQATRDLITMVGGPYYKVILGRKDGLVSQASRVEGNIPRVNMSMNQIIKMFASKGFTVQEMVALTGSHTIGFSHCKEFADRIFNHSKTVPTDPEIYPKFADALKKNCANYTKDPAMSAFNDVMTPGKFDNMYFQNLQRGLGLLASDHALIKNSRTKPIVDLFASNQTAFFEDFSQAMEKLGVYGIKTGQMGEVRHRCDAFN

SEQ ID NO: 979 - protein, 251 aa, Betula Verrucosa
ILISSTAFNSAERDADINHSLPGDAFDVVVRAKTALELACPNTVSCADILALATRDLVTMVGGPYYNVFLGRKDGLVSKSSYVEGKLPRPTMSISQIIELFASNGFSIQETVALSGAHTIGFSHCKEFSSGIYNYSKYSQYDTQYNPRFAQALQKACADYQKNPTLSVFNDIMTPNKFDNMYFQNLPKGLGLLSSDHGLNSDPRTKPFVETYAADQNKFFEAFGKAMEKLSLYKVKTGRQGEIRHRCDEFN

SEQ ID NO: 980 - protein, 81 aa, Betula Verrucosa
CPGVVSCSDILAMAARDAVFWAGGPIYDIPKGRKDGRRSKIEDTINLPPPTFNASQLIYMFGQHGFSAQEMVALSGAHTLG

SEQ ID NO: 981 - protein, 251 aa, Betula Verrucosa; identical to SEQ ID NO: 979

SEQ ID NO: 982 - protein, 83 aa, Betula Verrucosa
MCPGVVSCSDILAMAARDAVFWAGGPIYDIPKGRKDGRRSKIEDTINLPPPTFNASQLIYMFGQHGFSAQEMVALSGAHTLGV

SEQ ID NO: 983 - protein, 392 aa, Cynodon Dactylon
RHSIPSVGSRSSIALPPRTAIPSPRRISWTLTRAPRLQEGTHQEHYRISAMRLSLLLVLVAAFSAGAASQPLPPAGGKPLLTPDYYKQTCPRAERIIAEVIQSKQMANPTTAAGVLRVFFHDCFVGGCDASVLIASNQFAKSEHDADINQSLPGDAFDAVVRAKLALEMECPGVVSCADILSLASGVLVTMTGGPRYPVPLGRKDSLSSSPTAADADLPHSNFTVDRLIQMFGAKGFSVQELVALSGAHTLGFSHCKEFADRIFNYRDKAGKPEPFDPTMNPALAKGLQGACKDYLKDPTIAAFNDIMTPGKFDNMYFINLERGLGLLSTDEELWTDARTKPFVQLYASNSTKFFEDFGRAMEKLSLFGVKTGADGEIRRRCDTYNHGPMPK

SEQ ID NO: 984 - protein, 324 aa, Cynodon Dactylon
FSAGAASQPLPPAGGKPLLTPDYYKQTCPRAERIIAEVIQSKQMANPTTAAGVLRVFFHDCFVGGCDASVLIASNQFAKSEHDADINQSLPGDAFDAVVRAKLALEMECPGVVSCADILSLASGVLVTMTGGPRYPVPLGRKDSLSSSPTAADADLPHSNFTVDRLIQMFGAKGFSVQELVALSGAHTLGFSHCKEFADRIFNYRDKAGKPEPFDPTMNPALAKGLQGACKDYLKDPTIAAFNDIMTPGKFDNMYFINLERGLGLLSTDEELWTDARTKPFVQLYASNSTKFFEDFGRAMEKLSLFGVKTGADGEIRRRCDTYN

SEQ ID NO: 985 - protein, 71 aa, Fraxinus Excelsior
RGFSVQEMVALSGAQTIRFFHCKEFSSILYNYSQTLESAPSYKRVMIYECIQLNAIKYKKVMIYECIQKPN

SEQ ID NO: 986 - protein, 415 aa, Lollium Perenne
EHSRPLRSRHSLPSTSSEKHPLQVPRRPLSLAFLGPPRTSPALTSPAKLEGIKLTQRATRAQDPRTKQQLAAMRRMSLLLLAAAAVLAAAVVAVHAGPPPPVKLSPDFYSQTCPRAERIIAEVVQSKQMANPTTAAGVLRVFFHDCFVSGCDASVLIAPTHYAKSEKDADINHSLPGDAFDAVVRSKLALELECPGVVSCADILALASRVLITMTGGPRYPVPLGRKDSLSSNPAAPDVELPHSNFTVGRIIELFLAKGFTVQEMVALSGAHTLGFSHCQEFASRIYNYRDKGGKPAPFDPSMNPTYAKGLQAACQNYQKDPTIAAFNDIMTPGKFDNMYYVNIQRGLGLLSTDEDMWSDMRTKPFVQRYAANNADFFDDFSKAMEKLSMYGVKTGADGEIRRRCDAFNSGPITQ

SEQ ID NO: 987 - protein, 70 aa, Olea Europaea
PTYAKGLQAACQNYQKDPTIAAFNDIMTPGKFDNMYYVNIQRGLGLLSTDEDMWSDMRTKPFVQRYAANN

SEQ ID NO: 988 - protein, 302 aa, Plantago Lanceolata
SSTAGEPLLLLGLIGPRTRPIFPVIIKNVGRKRLANVGAVASTSPLPRRQLLFMATTSFLLPFPNSASAVDEIDLIKEEIGKVITKIKAAGLLRLVFHDAGTFDQGDEAGGMNGSIVYELDRPENTGLAKSIKVLEKAKIQVGAVRPVSWADLIAVAGAEAVSICGGPNIPVKLGRIDAIVPDPEGRLPEESFAATAMKDNFQKKGFTTQELVALSGAHTLGGKGFGKPTVFDNSYYKILLDRPWSAGGMSSMIGLPSDRALVEDDECIRWISKYADDQVLFFEDFKNAYVKLVNTGAKWKR

SEQ ID NO: 989 - protein, 355 aa, Poa Pratensis
PKSHTRVGSTYQPAAMRRLSLLLLAAAALLAAAVSAAPGPAPKLSPDFYSQTCPRAERIIAEVVQSKQMANPTTAAGVLRVFFHDCFVSGCDASVLIAPTHYAKSEKDADINHSLPGDAFDAVVRSKLALELECPGVVSCADILALASRVLVTMTGGPRYPVPLGRKDSLSSNPTAPDVELPHSNFTVGRIIELFVAKGFTVQEMVALSGAHTLGFSHCQEFASRIYNYRDKGGKPAPFDPSMNPTYAKGLQAACQDYQKDPTIAAFNDIMTPGKFDNMYYVNIQRGLGLLSTDEDMWSDMRTKPFVQRYAANNTDFFDDFSKAMEKLSMYGVKTGADGEIRRRCDAFNSGPTTQ

SEQ ID NO: 990 - protein, 368 aa, Quercus Alba
DFPFSLSLIFHTSFVLATLLLRFKSILIRSLSLVKMVIGKILGLILLMEMIVHGFRFEVVDGFRFDVVNGFRFGVVDGLSMEYYLLRCPLAELIVKIKVIKALQADPTLAASLVRLHFHDCFIEGCDGSVLLNSTKQNKAERDSPANLSLRGFELIDEIKEELEKQCPGIVSCADILAMAARDAVCKAGGPLYDIPKGRMDGTRSKIEDTINLPAPTFNASQLINLFGQHGFSAQEMVALSGAHTLGVARCSSFKNRLVGGLDANLNADFAKTLFTTCSASDTAEQPFDETRNTFDNLYYRALQCKSGVLDSDQTLYASAETKGIVDSYASNKVMFFSDFKRAMVKMSMLNVKQGSQGEVRQNCYKIN

SEQ ID NO: 991 - protein, 303 aa, Quercus Alba
KLSVDYYTKTCPDFDSIMRETVTSKQINSPTTAAGTLRLFFHDCMVDGCDASVLISTNPFNKAERDADINLSLPGDAFDLVVRAKTALELSCPGIVSCADILAQATRDLITMVGGPFYKIRLGRKDGFESKAELVNGQVPQPNMSVNQLIKVFAAKGFSAQEMVALTGAHTIGFSHCKEFSHRIFNYSKTSPSDPEMYPKYAEALRKTCSNYLKDPGMSAFNDIMTPSKFDNMYYQNLQRGLGLLATDHALSKHPRTKPFVDLYASNQTKFFEDFSHAMEKLSVFGIKTGRKGEVRHKCDAFN

SEQ ID NO: 992 - protein, 354 aa, Betula Verrucosa
MELDLSPKLAKKVYGDNGGAYHAWSPSELPMLREGNIGAAKLALEKHGFALPRYSDSAKVAYVLQGNGVAGIVLPESEEKVLAIKKGDAIALPFGVVTWWYNKEDTELVVLFLGDTSKAHKAGEFTDFFLTGSNGIFTGFSTEFVGRAWDLDEKVVKTLVGKQSGNGIVKLDGKFEMPEPKKEHREGMALNCEEAPLDVDIKKGGRVVVLNTKNLPLVGEVGLGADLVRLDGGAMCSPGFSCDSALQVTYVVRGSGRVQVVGVDGRRVLETTLKAGNLFIVPRFFVVSKIASPDGMEWFSIITTPNPIFTHLAGKTSVWKALSPEVLKAAFNVDPDTEKLFRSKRTSDAIFFPP

SEQ ID NO: 993 - protein, 96 aa, Cynodon Dactylon
AKVAYVLQGAGTCGIVLPEATKEKVVAVKEGDALALPFGVVTWWHNLPESATELVVLFLGDTSKGHKPGQFTNFQLTGATGIFTGFSTEFVGRAWD

SEQ ID NO: 994 - protein, 160 aa, Cynodon Dactylon
FVGRAWDLTEADAAKLVSSQPASGIIKLGAGQKLPAPSAEDREGMALNCLEAPLDVDIKNGGRVVVLNTVNLPLVKEVGLGADLVRIDAHSMCSPGFSCDSAYQVTYIVRGSGRVQVVGPDGKRVLETRVEGGYLFIVPRFHVVSKIADESGMEWFSIIT

SEQ ID NO: 995 - protein, 367 aa, Cynodon Dactylon
MVNRTATAEVMSMDLSPKKPAKAYGSDGGSYYDWSPADLPMLGVASIGAAKLHLAAGGLALPSYSDSAKVAYVLQGTGTCGVVLPEATKEKVIPVKEGDALALPFGVVTWWHNAHAAATDLVVLFLGDTSKGHKAGQFTNFQLTGASGIFTGFSTEFVGRAWDLDQDAAAKLVSTQPGSGIVMVKDGHKMPAPRDEDRAGMVLNCLEAPLDVDIKGGGRVVVLNTQNLPLVKEVGLGADLVRIDAHSMCSPGFSCDSAYQVTYIVRGSGRVQVVGIDGTRVLETRAEGGCLFIVPRFFVVSKIADETGMEWFSIITTPNPIFSHLAGKTSVWKAISPAVLETSFNTTPEMEKLFRSKRLDSEIFFAP

SEQ ID NO: 996 - protein, 357 aa, Quercus Alba
KTMEVDLSPKLAKKVYGDNGGSYHAWSPSELPMLREGNIGAAKLALEKNGFALPCYSDSSKVAFVLQGNGVAGIVLPESEEKVLAIKKGDAIALPFGAVTWWYNKEDTELVVLFLGDTSKAHKAGEFTEFFLTGSNGIFSGFSTEFVSRAWDLDENVVKTLVGKQSGNGIVKLDENFEMPEPKKEHRFGMAFNCEEAPLDVDIKKGGRVVLLNTNVLPMLGEAGLGGDLVRLDGSAMCSPGYSCDSALQVTYIVRGSGRVQVVGVDGRRVLESTLKAGNLFIVPRFFVVSKIASPEGMDWFTVITSPKSPTFTQLAGRTSVWKALSPSVLQASFDVDADTEKLFRSKRTSEAIFFPP

SEQ ID NO: 997 - protein, 70 aa, Quercus Alba
KNGGRVVVLNTKNLPLVGEVGLGADLVRLDGHAMCSPGFSCDSALQVTYIVRGSGRVQVVGVDGRRVLET

SEQ ID NO: 998 - protein, 846 aa, Ambrosia Artemisiifolia
SQDEAGTAAIKAVELDAILGGRAVQHREPQNFESDKFISYFKPCIAPLEGGVKSGFKKPVEEEFETRLYTCRGKRVVHLKQVPFSRSMLNHDDVFILDTKDKIFQFNGANSNIQERAKALEVIQFLKDKYHEGTCNVAIVDDGKLQAEGDSGEFWVIFGGFAPIGKKVLSDDDIIPDRTAGKLYSIAGGKVADQIADYSKSSFESDKCYLMDCGSEVFVWVGRATQVDDRKAASQAAEEFLTSNKRPKATLITRLIQGYETHSFKSNFDSWPSSTAPAAENRGKVAENRGKVSALLKQQGGGPKGKEKNTPTVEEAVPPLLEANGKLEVWSIDGGAKHPVASEDIGKFYNGDCYIVLYSYHSREKKEDFYLCHWIGKDSTEEDQNTAAKLTTSMFNSMKGRPVQGRIYQEKEPPQFIALFQPMVLFKGGLSSSYKSYIAEKGLTDETYSPDNAAIIRISGTAVHNNKAVHLDPVPASLNSHECFVVHAGSHLYIWQGTQSTYEQQEWAAKIAEFLKPGKTAKYQKEGTESATFWLGLGGKEDVSTNKVSFDTIRDPHLFAFSLSKGKFEVEEVYNFDQDDLLPEDMLILDTHAEVFVWIGHAVDPKEKKNALEYGQKYIAWAESLDGLSPRVPLYRVPDGNEPNFFTTYFSWEPAKTMIHGNAFEKKVTILFGGHDEGAGNQGGGNTQRAAAMAALNSTFNSPGGGGKASGATKGSNANSQRRAAVAALSGVIPDAKIDEPDSPEKPEEAPEEPVEPSEPIPEDNDSEPKVAIEEDENGILTSKSTFSYEQVRVKSEDPAPDIDLKRREAYLSVEEFESVLGMTREEFYKLPKWKQDLTKKKVDLF

SEQ ID NO: 999 - protein, 824 aa, Ambrosia Psilostachya
AVQHREPQNFESDKFISYFKPCIAPLEGGVKSGFKKPVEEEFETRLYTCRGKRVVHLKQVPFSRSMLNHDDVFILDTKDKIFQFNGANSNIQERAKALEVIQFLKDKYHEGTCNVAIVDDGKLQAEGDSGEFWVIFGGFAPIGKKVLSDDDIIPDRTAGKLYSIAGGKVADQIADYSKSSFESDKCYLMDCGSEVFVWVGRATQVDDRKAASQAAEEFLTSNKRPKATLITRLIQGYETHSFKSNFDSWPSSTAPAAENRGKVAENRGKVSALLKQQGGGPKGKEKNTPTVEEAVPPLLEANGKLEVWSIDGGAKHPVASEDIGKFYNGDCYIVLYSYHSREKKEDFYLCHWIGKDSTEEDQNTAAKLTTSMFNSMKGRPVQGRIYQEKEPPQFIALFQPMVLFKGGLSSSYKSYIAEKGLTDETYSPDNASIIRISGTAVHNNKAVHLDPVPASLNSHECFVVHAGSHLYIWQGTQSTYEQQEWAAKIAEFLKPGKTAKYQKEGTESATFWLGLGGKEDVSTNKVSFDTIRDPHLFAFSLSKGKFEVEEVYNFDQDDLLPEDMLILDTHAEVFVWIGHAVDPKEKKNALEYGQKYIAWAESLDGLSPRVPLYRVPDGNEPNFFTTYFSWEPSKTMIHGNAFEKKVTILFGGHDEGAGNQGGGNTQRAAAMAALNSTFNSPGSGGKASGATKGSNANSQRRAAVAALSGVIPDAKIDEPDSPEKPEEAPEEPVEPSEPIPEDNDSEPKVAIEEDENGILTSKSTFSYEQVRVKSEDPVPDIDLKRREAYLSVEEFESVLGMTREEFYKLPKWKQDLTKKKVDLF

SEQ ID NO: 1000 - protein, 964 aa, Betula Verrucosa
MSSSTKLDPAFQGAGQRVGTEIWRIENFQPVPLPKSENGKFYMGDCYIVLQTTQGRGGAYLFDIHFWIGKDSSQDESGTAAIKTVELDSALGGRAVQHRELQGHESDKFLSYFKPCIIPLEGGVASGFKTPEEEEFETRLYVCRGKRVVRMKQVPFARSSLNHDDVFILDTQDKIYQFNGANSNIQERAKALEVIQFLKEKYHVGKCDVAIVDDGKLDTESDSGEFWVLFGGFAPIGKKVASEDDIIPEATPAKLYSITDGQVKIIEGELSKSLLENNRCYLVDCGSEVFVWVGRVTQVEERKTAIQAAEEFVASQNRPKSTRITRLIQGYETHSFKSNFGSWPLGSATPGNEEGRGKVAALLKQQGVGVKGMTKSAPVNEEVPPLLEGGGKMEVWRINGSAKTPLPREDIGKFYSGDCYIVLYTYHSGDRKEDYFLCCWFGKDSIEEDQKMATRLANTMFNSLKGRPVQGRIFQGKEPPQFVALFQPMLVLKGGLSSGYKKIIADKGLVDETYTADSVALIQISGTSVHNNKAMQVDAVATSLNSMECFILQSGSSIFTWHGNQCTFEQQQLAAKVAEFLKPGVALKHAKEGTESSTFWFALGGKQSYTSKKVAQEIVRDPHLFTFSFNRGKFQVEEVHNFCQDDLLTEDILILDTHAEVFVWVGWSVDSKEKQNTFEIGQKYIEVAASLEGLSPQVPLYKVTEGNEPCFFTTYFQWDLTKAVVQGNSFQKKVALLFGIGHAVEDKSTGNQGGPTQRASALAALSSAFHPSSGKSGSMDKSNGSSQGPRQRAEALAALNSAFNSSSGTKTVAPRASAAGQGSQRAAAVAALSSVLTAEKKQSPDASPTRSSSSPPPESDAPEVPREVAEVKETEEVAPVSESNGEDSEPKQEQEEHDSGSSQTFSYDQLKAKSDNPVTGIDFKRREAYLSEEEFPTIFGITKEAFYKLPKWKQDMQKRKFDLF

SEQ ID NO: 1001 - protein, 958 aa, Cynodon Dactylon
MSSAKAVLEPAFQGAGHKPGTEIWRIEDFKPVPLPKSDYGKFYRGDSYIVLQTTCNKGGAYLLDIHFWIGKDSSQDEAGTAAIKTVELDTMLGGRAVQHREPQGYESDKFLSYFKPCIIPLEGGFASGFKKPEEDKFETRLYICKGKRAIRVKEVPFARSQLNHDDVFILDTEKKIYQFNGANSNIQERAKALEVIQHLKEKYHDGVCGVAIVDDGKLQAESDSGEFWVLFGGFAPIGKKTVSDDDVVLETTPPKLYSINNGQLKLEDTVLTKSILENTKCFLLDCGAELFVWVGRVTQVEDRKTASVAVENFILKQNRPKTTRITQVIQGYENHTFKSKFESWPVSNAAGNASAEEGRGKVAALLKQKGDVKGVSKSNAPVQDEVPPLLESGDKLEVWCINENGKTCLEKEELGKFYSGDCYVVLYTYHSGDKREEFYLTYWIGKDSLPEDQEMALQTSNTIWNSLKGRPVLGRIYQGKEPPQFVALFQPMVILKGGISSGYKKFVEQKGLTDETYSADGIALVRISGTSVHNNKTLQVDSVSTSLSSTECFVLQSGKLMFTWIGNSSSFEQQQWAVKVAEFLKPGIAVKHCKEGTESSAFWSAIGGKRTYTSKNVAPDVFIRDPHLYTFSLRNGKMEVTEVFNFSQDDLLTEDMMIFDTHSEVFIWVGQCVETKDKQKAFEIGQKYVEHAVAFEGIAPDVPLYKVIEGNEPCFFRTYFSWDNTRSVIQGNSFEKKLSVLFGMRSEGGCKSSGDGGPTQRASALAALSSALNPSSQGKQSNERPTSSGDGGPTQRASAMAALTSALNPSSKPSSPQHQSRSGQGSQRAAAVAALSNVLTAEGSSHSPHAEKTEVAPFSESEAEESPESFTDQDAQGGRTEPDVSHEQTANENGGETTFSYDRLISKSTNPVGGIDYKRRETYLSDSEFETIFGMTKEEFYEQPRWKQELQKKKADLF

SEQ ID NO: 1002 - protein, 973 aa, Quercus Alba
SSAKLDPAFQGAGQRVGTEIWRIENFQPVPLPKSEYGKFYMGDCYIVLQTAQGKGGAYTLDIHFWIGKDSSQDESGTAALKSVELDAVLGGRAVQHREIQGYESDKFLSYFKPCIIPLEGGVASGFKTPEEDVFETRLYVCRGKRVVRMKQVPFARSSLNHDDVFILDTQNKIYQFNGANSNIQERAKALEVIQFLKEKYHVGTCDVAIVDDGKLDTESDSGEFWVLFGGFAPIGKKVTSEDDIIPEAAPAKLYSITDGQVKIVESGLSKSLLENNKCYLLDCGAEVFVWIGRVTQVEERKAAVQVAEEFLTGQNRPKSTRITRLIQGHETRSFKSNFDSWPSGSATPGNEEGRGKVAALLKQQGVGVKGMTKGAPVNEEVPPLLEGCGKMEVWRINGSAKTPLPKEDVGKFYSGDCYIVLYTYHSGDRKEDYLLCCWFGKDSIEEDQKMATRLASTMFNSLKGRPVQGRIFQGKEPPQFVALFQPMVVLKGGLSSGYKKFIADKGLTDETYTADSVALIQISGTSTHNNKAVQVDAAATSLNSMECFVLQSGSSIFSWHGNQSTFEQQQLAAKVSEFLRPGVALKHAKEGTESSSFWFPLGGKQSYTSKKVSQEIVRDPHLFTFSFNKGKFQVEEVYNFSQDDLLTEDILVFDTHAEVFVWVGQSVDSREKQNAFEIGQKYIEMAASLEGLSSNVPLYKVTEGNEPCFFTTYFSWDQNKAVVQGNSFQKKIALLFGIGHVVEDKSSGNQGGPTQRASALAALSSAFHPSSGKPTQTDKSNGSNQGPRQRAEALAALNSAFNSSPGAKTSAPRPSGRGQGSQRAAAVAALSSVLTAEKKSDESPTRSSSSPPPETNSPAETKSENDQSESEGPQEVAEIKESEEVAPRSESNGGNSEPKQETVQENDSGSGRTFSYDQLKAKSDNPVTGIDFKRREAYLSDEEFQSVFGITKEAFNKLPRWKQDMQKKKVDLF

SEQ ID NO: 1003 - protein, 93 aa, Ambrosia Artemisiifolia
QLQAFTKAYTDLESACSGLNVLVATYFADVPADAFKTLTTLPGVAGYTFDLVRGEKTLDLIKTSFPSGKYLFAGVVDGRNIWANDLAGSLSVL

SEQ ID NO: 1004 - protein, 80 aa, Ambrosia Artemisiifolia
CSLLHTAVDLVNETKLDDEIKSWLAFAAQKVVEVNALAKALGGQKDEAFFSANAAAQASRKSSPRVNNEAVQKAAAGLKG

SEQ ID NO: 1005 - protein, 66 aa, Ambrosia Artemisiifolia
KDEAYFSANAAAQASRKSSPRVTNEAVQKAAAALRGSDHRRATNVSARLDAQQKKLNLPILPTTTI

SEQ ID NO: 1006 - protein, 89 aa, Ambrosia Artemisiifolia
KISEEEYVKAIKEEIFKVVQLQEELDIDVLVHGEPERNDMVEYFGEQLSGFAFTANGWVQSYGSRCVKPPIIYGDVSRPKAMTVFWSTM

SEQ ID NO: 1007 - protein, 87 aa, Ambrosia Artemisiifolia
KISEEEYVKAIKEEIFKVVQLQEELDIDVLVHGEPERNDMVEYFGEQLSGFAFTANGWVQSYGSRCVKPPIIYGDVSRPKAMTVFWS

SEQ ID NO: 1008 - protein, 108 aa, Ambrosia Psilostachya
DLEAYQLEAFTKAYSALESACSGLNVIVAIYFADVPAEAVKTLTSLPGVSGYTFDLVRGEKTLGLIKSNFPLGKYLFAVLFDGRNIWANDLAGSVAVLESLEGVVGKD

SEQ ID NO: 1009 - protein, 565 aa, Ambrosia Psilostachya
MVHSSVLGFPRMGADRELKKANEAYWADKLSRDDLIKEGKRLRLEHWKIQKDAGVDVIPSNDFAFYDHLLDHIQLFNAIPERYSKHSLHKLDEYFAMGRGHQKDGVDVPSLEMVKWFDSNYHYVKPTLQDNQTFQLAENPKPVAEFLEAKEAGITTRPVLIGPVSFLALGKADRGQSVDPISLLEKLLPVYVELLQKLKEAGAEYVQIDEPVLVYDLPQKVKDAFKPAYEKLVSDSLPKLVLATYFGDIVHNFDVFPSLQGVAGIHIDLVRNPEQLESVAGKLGSNQVLSVGVVDGRNIWKTNFKRAIELVETAVQKLGKDRVLVATSSSLLHTPHSLDSEKKLPEEVKDWFSFAVQKVSEVVVIAKAVNDGPAAVREALEANAKSMQARASSERTNNKAVKDRQASVTPEQHERKSAFPERYAQQKKHLSLPTFPTTTIGSFPQTKEIRISRNKFTKGEITAEEYEKFIEKEIEEVVKIQDELGLDVYVHGEPERNDMVQYFGERLDGYVFTTKGWVQSYGSRCVRPPIIVGDISRPAPMTVKESKYAASVAKKPMKGMLTGPI

SEQ ID NO: 1010 - protein, 562 aa, Betula Verrucosa
MASHIVGYPRMGPKRELKFALESFWDGKTSAEDLQRVASDLRSSIWKQMADAGIKHIPSNTFSYYDQVLDTTALLGAVPPRYGWNGGEIGFDTYFSMARGNASVPAMEMTKWFDTNYHFIVPELGPDVKFSYASHKAVEEYKEAKALGVDTVPVLVGPVSYLLLSKPAKGVEKTFPLLSLLGKILPIYKEVISELKAAGATWIQFDEPTLVMDLDSHKLKAFTDAYSELESSLSGLNVIVETYFADVPAEAYKTLTALKGVTAFGFDLIRGTNTLDLIKGEFPKGKYLFAGVVDGRNIWANDLAASLGTLLALEGIVGKDKLVVSTSCSLLHTAVDLVNETKLDKEIKSWLAFAAQKVVEVNALAKALVGHKDEAFFSANAAALASRKSSPRVTNEAVQKAAAALKGSDHRRATNVSARLDAQQKKLNLPILPTTTIGSFPQTIELRRVRREYKANKISEEEYVKAIKEEINKVVKLQEELDIDVLVHGEPERNDMVEYFGEQLSGFAFTVNGWVQSYGSRCVKPPIIYGDVSRPKPMTVFWSAAAQSMTARPMKGMLTGPV

SEQ ID NO: 1011 - protein, 608 aa, Betula Verrucosa
MASHVVGYPRMGPKRELKFALESFWDGKSSAEELKKVAADLRSSIWKQMADAGIKYIPSNTFSYYDQVLDTTAMLGAVPPRYGWSGGEIGFDVYFSMARGNASLPAMEMTKWFDTNYHFIVPELGPDVKFSYASHKAVDEFKEAKALGVDTVPVLVGPVSYLLLSKPAKGVEKSFSLLSLIDKILPVYKEVVTELKAAGATWIQFDEPSLILDLHAHQLQAFSHAYTELESSFSGLNVLIETYFADVSADAYKTLTSLKGVSGYGFDLVRGTQTLDLIKSGFPSGKYLFAGVVDGRNIWANDLASSLSILQTLEGTVGKDKIVVSTSCSLLHTAVDLVNETKLDKEIKSWLAFAAQKVVEVNALAKALSGHRDQAFFSANAAALASRKSSPRVTNEAVQKAAAALKGSDHRRATNVSARLDAQQKKLNLPILPTTTIGSFPQTIELRRVRREYKANKISEEEYVKAIKEEINKVVKLQEELDIDVLVHGEPERNDMVEYFGEQLSGFAFTVNGWVQSYGSRCVKPPIIYGDVSRPKPMTVFWSAAAQSMTARPMKGMLTGPVTILNWSFVRNDQPRHETCYQIALAIKDEVEDLEKASINVIQIDEAA

SEQ ID NO: 1012 - protein, 562 aa, Cynodon Dactylon
MASHIVGYPRMGPKRELKFALESFWDGKSSAEDLEKVATDLRASIWKQMSEAGIKYIPSNTFSYYDQVLDTTAMLGAVPERYSWTGGEIGLSTYFSMARGNATVPAMEMTKWFDTNYHFIVPELGPTIKFTYASHKAVSEYKEAKALGIDTVPVLIGPVSYLLLSKPAKGVDKSFSLLSLLSSILPIYKEVVSELKAAGASWIQFDEPTLVKDLDAHELAAFTSAYAELESAFSGLNVLIETYFADIPAENYKTLTSLSGVTAYGFDLVRGSKTLDLVRSSFPSGKYLFAGAVDGRNIWADDLATSLSTLESLEAVVGKAKLVVSTSCSLMHTAVDLVNETKLDDEIKSWLAFAAQKVVEVNALAKALAGQKDEAYFAANAAAQASRRSSPRVTNEEVQKAAAALRGSDHRRATNVSARLDAQQKKLNLPVLPTTTIGSFPQTMDLRRVRREYKAKKISEEEYTNAIKEEISKVVKIQEELDIDVLVHGEPERNDMVEYFGEQLSGFAFTANGWVQSYGSRCVKPPIIYGDVSRPNPMTVYWSKTAQSMTSRPMKGMLTGPV

SEQ ID NO: 1013 - protein, 608 aa, Cynodon Dactylon
MASHIVGYPRMGPKRELKFALESFWDGKSSAEDLEKVATDLRASIWKQMSEAGIKYIPSNTFSYYDQVLDTTAMLGAVPERYSWTGGEIGLSTYFSMARGNATVPAMEMTKWFDTNYHFIVPELGPTIKFTYASHKAVSEYKEAKALGIDTVPVLIGPVSYLLLSKPAKGVDKSFSLLSLLSSILPIYKEVVSELKAAGASWIQFDEPTLVKDLDAHELAAFTSAYAELESAFSGLNVLIETYFADIPAENYKTLTSLSGVTAYGFDLVRGSKTLDLVRSSFPSGKYLFAGAVDGRNIWADDLATSLSTLESLEAVVGKAKLVVSTSCSLMHTAVDLVNETKLDDEIKSWLAFAAQKVVEVNALAKALAGQKDEAYFAANAAAQASRRSSPRVTNEEVQKAAAALRGSDHRRATNVSARLDAQQKKLNLPVLPTTTIGSFPQTMDLRRVRREYKAKKISEEEYTNAIKEEISKVVKIQEELDIDVLVHGEPERNDMVEYFGEQLSGFAFTANGWVQSYGSRCVKPPIIYGDVSRPNPMTVYWSKTAQSMTSRPMKGMLTGPVTILNWSFVRNDQPRFETCYQIALAIKKEVEDLEAAGIQVIQIDEAA

SEQ ID NO: 1014 - protein, 562 aa, Quercus Alba
MASHIVGYPRMGPKRELKFALESFWDGKSSAEELQKVSADLRSSIWKQMADAGIKYIPSNTFAYYDQVLDTTAMLGAVPPRYGWNGGEIGFDTYFSMARGNASVPAMEMTKWFDTNYHFIVPELGPDVNFSYASHKAVSEYKEAKALGVDTVPVLVGPVSYLLLSKPAKGVDKNFSLLSLLEKILPIYKEVISELKAAGASWIQFDEPTIVLDLDSHKLKAFTDAYSELESSLSGLNVLIETYFADIPAEAFKTLTALKGVTAFGFDLVRGTKTLDLIKAEFPKGKYLFAGVVDGRNIWANDLAASLSTLHALEGIVGKDKLVVSTSCSLLHTAVDLVNETKLDKEIKSWLAFAAQKVVEVNALAKALAGHKDDAFFSDNAAAQASRKSSPRVTNESVQKAAAALKGSDHRRATNVSARLDAQQKKLNLPILPTTTIGSFPQTIELRRVRREYKAKKISEDEYVKAIKEEINKVVKLQEELDIDVLVHGEPERNDMVEYFGEQLSGFAFTVNGWVQSYGSRCVKPPIIYGDVSRPNPMTVFWSSAAQSMTARPMKGMLTGPV

SEQ ID NO: 1015 - protein, 608 aa, Quercus Alba
MASHIVGYPRMGPKRELKFALESFWDGKSSAEELQKVSADLRSSIWKQMADAGIKYIPSNTFAYYDQVLDTTAMLGAVPPRYGWNGGEIGFDTYFSMARGNASVPAMEMTKWFDTNYHFIVPELGPDVNFSYASHKAVSEYKEAKALGVDTVPVLVGPVSYLLLSKPAKGVDKNFSLLSLLEKILPIYKEVISELKAAGASWIQFDEPTIVLDLDSHKLKAFTDAYSELESSLSGLNVLIETYFADIPAEAFKTLTALKGVTAFGFDLVRGTKTLDLIKAEFPKGKYLFAGVVDGRNIWANDLAASLSTLHALEGIVGKDKLVVSTSCSLLHTAVDLVNETKLDKEIKSWLAFAAQKVVEVNALAKALAGHKDDAFFSDNAAAQASRKSSPRVTNESVQKAAAALKGSDHRRATNVSARLDAQQKKLNLPILPTTTIGSFPQTIELRRVRREYKAKKISEDEYVKAIKEEINKVVKLQEELDIDVLVHGEPERNDMVEYFGEQLSGFAFTVNGWVQSYGSRCVKPPIIYGDVSRPNPMTVFWSSAAQSMTARPMKGMLTGPVTILNWSFVRNDQPRHETCYQIALSIKDEVEDLEKAGINVIQIDEAA

SEQ ID NO: 1016 - protein, 627 aa, Ambrosia Artemisiifolia
MVKFTAEELRRIMDFKHNIRNMSVIAHVDHGKSTLTDSLVAAAGIIAQEVAGDVRMTDTRADEAERGITIKSTGISLYYEMTDEALKSFKGERNGNEYLINLIDSPGHVDFSSEVTAALRITDGALVVVDCIEGVCVQTETVLRQALGERIRPVLTVNKMDRCFLELQVDGEEAYQTFQRVIENANVIMATYEDPLLGDVMVYPEKGTVAFSAGLHGWAFTLTNFAKMYASKFGVDEAKMMERLWGENYFDPKTKKWTTKSTGSATCKRGFVQFCYEPIKQIINTCMNDKKDQLWPMLTKLGVTMKSEEKELMGKALMKRVMQNWLPAATALLEMMIFHLPSPHTAQRYRVENLYEGPLDDQYANAIRNCDPDGPLMLYVSKMIPASDKGRFFAFGRVFAGRVSTGLKVRIMGPNYVPGEKKDLYVKSVQRTVIWMGKKQETVEDVPCGNTVAMVGLDQFITKNATLTNEKEVDAHPIRAMKFSVSPVVRVAVQCKVASDLPKLVEGLKRLAKSDPMVVCTIEESGEHIIAGAGELHLEICLKDLQDDFMGGAEIVVSDPVVSFRETVLEKSSRTVMSKSPNKHNRLYMEARPMEDGLAEAIDEGRVGPRDDPKVRGKILSEEFGWD

SEQ ID NO: 1017 - protein, 105 aa, Ambrosia Psilostachya
DFMGGAEIVVSDPVVSFRETVLEKSSRTVMSKSPNKHNRLYMEARPMEDGLAEAIDEGRVGPRDDPKVRGKILSEEFGWDKDLAKKIWCFGPETTGPNMVVDMCK

SEQ ID NO: 1018 - protein, 243 aa, Ambrosia Psilostachya
AIDEGRVGPRDDPKVRGKILSEEFGWDKDLAKKIWCFGPETTGPNMVVDMCKGVQYLNEIKDSVVAGFQWASKEGALAEENMRGICFEVCDVVLHADAIHRGGGQVIPTARRVIYASQLTAKPRLLEPVYLVEIQAPEQALGGIYSVLNQRRGHVFEEMQRPGTPLYNIKAYLPVVESFGFSGALRASTSGQAFPQCVFDHWDMMSSDPLEAGSQASTLVSQIRKRKGLKEQMTPLSEFEDKL

SEQ ID NO: 1019 - protein, 842 aa, Betula Verrucosa
MVKFTADELRRIMDYKHNIRNMSVIAHVDHGKSTLTDSLVAAAGIIAQESAGDVRMTDTRADEAERGITIKSTGISLYYEMTDESLKSYKGERHGNEYLINLIDSPGHVDFSSEVTAALRITDGALVVVDCVEGVCVQTETVLRQALGERIRPVLTVNKMDRCFLELQVDGEEAYQTFQRVIENANVIMATYEDPLLGDVQVYPEKGTVAFSAGLHGWAFTLTNFAKMYASKFGVDESKMMERLWGENFFDPATKKWTTKNSGSPTCKRGFVQFCYEPIKQIINTCMNDQKDKLWPMLQKLGVTMKSDEKDLMGKALMKRVMQTWLPASTALLEMMIFHLPSPSKAQRYRVENLYEGPLDDIYANAIRNCDPEGPLMLYVSKMIPASDKGRFFAFGRVFSGKVSTGLKVRIMGPNFVPGEKKDLYTKSVQRTVIWMGKKQETVEDVPCGNTVALVGLDQYITKNATLTNEKEVDAHPIRAMKFSVSPVVRVAVQCKVASDLPKLVEGLKRLAKSDPMVVCTIEESGEHIIAGAGELHLEICLKDLQDDFMGGAEIIKSDPVVSFRETVLEKSCRTVMSKSPNKHNRLYMEARPLEEGLAEAIDDGRIGPRDDPKARSKILSEEFGWDKDLAKKIWCFGPETTGPNMVVDMCKGVQYLNEIKDSVVAGFQWASKEGALAEENMRGICFEVCDVVLHADAIHRGGGQVIPTARRVIYASQITAKPRLLEPVYLVEIQAPEQALGGIYSVLNQKRGHVFEEMQRPGTPLYNIKAYLPVVESFGFSSTLRAATSGQAFPQCVFDHWEMMSSDPLEPGSQASQLVADIRKRKGLKEQMTPLSEFEDK

SEQ ID NO: 1020 - protein, 837 aa, Cynodon Dactylon
EELRKIMDKKNNIRNMSVIAHVDHGKSTLTDSLVAAAGIIAQEVAGDVRMTDTRADEAERGITIKSTGISLYYEMTDDSLKSFKGDRDGNEYLINLIDSPGHVDFSSEVTAALRITDGALVVVDCIEGVCVQTETVLRQALGERIRPVLTVNKMDRCFLELQVDGEEAYQTFSRVIENANVIMATYEDKLLGDVQVYPEKGTVAFSAGLHGWAFTLTNFAKMYASKFGVDESKMMERLWGENFFDPSTKKWTTKNTGSPTCKRGFVQFCYEPIKQIINTCMNDQKDKLWPMLQKLNVTMKSDEKELMGKALMKRVMQTWLPASTALLEMMIFHLPSPSTAQKYRVENLYEGPLDDIYATAIRNCDPEGPLMLYVSKMIPASDKGRFFAFGRVFSGRVATGMKVRIMGPNYVPGQKKDLYVKSVQRTVIWMGKKQESVEDVPCGNTVAMVGLDQFITKNATLTNEKEVDACPIRAMKFSVSPVVRVAVQCKVASDLPKLVEGLKRLAKSDPMVLCTIEESGEHIIAGAGELHLEICLKDLQEDFMGGAEIIVSPPVVSFRETVLEKSCRTVMSKSPNKHNRLYMEARPLEEGLPEAIDEGRIGPRDDPKVRSKILSEEFGWDKDLAKKIWCFGPETTGPNMVVDMCKGVQYLNEIKDSVVAGFQWASKEGALAEENMRGICFEVCDVVLHADAIHRGGGQVIPTARRVIYASQLTAKPRLLEPVYLVEIQAPENALGGIYGVLNQKRGHVFEEMQRPGTPLYNIKAYLPVIESFGFSSTLRAATSGQAFPQCVFDHWDMMSSDPLEAGSQAAQLVLDIRKRKGLKEQMTPLSEFEDKL

SEQ ID NO: 1021 - protein, 843 aa, Quercus Alba
MVKFTADELRRIMDLKENIRNMSVIAHVDHGKSTLTDSLVAAAGIIAQEVAGDVRMTDTRADEAERGITIKSTGISLYYEMSNESLKSYKGERNGNEYLINLIDSPGHVDFSSEVTAALRITDGALVVVDCIEGVCVQTETVLRQALGERIRPVLTVNKMDRCFLELQVDGEEAYTSFQKVIENANVIMATYEDPLLGDVQVYPEKGTVAFSAGLHGWAFTLTNFAKMYASKFGVDESKMMERLWGENFFDPATKKWTTKNTGSPTCKRGFVQFCYEPIKQIINTCMNDQKDKLWPMLAKLGVTMKSEEKELMGKPLMKRVMQNWLPASSALLEMMIFHLPSPSTAQKYRVENLYEGPLDDSYASAIRNCDPEGPLMLYVSKMIPASDKGRFFAFGRVFSGKVSTGLKVRIMGPNFVPGEKKDLYLKSVQRTVIWMGKKQETVEDVPCGNTVALVGLDQYITKNATLTNEKEVDAHPIRAMKFSVSPVVRVAVQCKVASDLPKLVEGLKRLAKSDPMVVCSIEESGEHIIAGAGELHLEICLKDLQDDFMGGAEISKTDPIVSFRETVLDKSSRVVMSKSPNKHNRLYMEARPMEEGLAEAIDDGRIGPRDDPKVRSKILAEEFGWDKDLAKKIWCFGPETTGPNMVVDMCKGVQYLNEIKDSVVAGFQWASKEGALAEENMRGICFEVCDVVLHADAIHRGGGQVIPTARRVIYASQLTAKPRLLEPVYMVEIQAPEQALGGIYSVLNRKRGHVFEEMQRPGTPLYNIKAYLPVKESFGFSQDLRAATSGQAFPQCVFDHWDIVSSDPLEAGSVAAQLVTDIRQRKGLKEQMTPLSDYEDKL

SEQ ID NO: 1022 - protein, 568 aa, Quercus Alba
MVKFTADELRRIMDLKENIRNMSVIAHVDHGKSTLTDSLVAAAGIIAQEVAGDVRMTDTRADEAERGITIKSTGISLYYEMSNESLKSYKGERNGNEYLINLIDSPGHVDFSSEVTAALRITDGALVVVDCIEGVCVQTETVLRQALGERIRPVLTVNKMDRCFLELQVDGEEAYTSFQKVIENANVIMATYEDPLLGDVQVYPEKGTVAFSAGLHGWAFTLTNFAKMYASKFGVDESKMMERLWGENFFDPATKKWTTKNTGSPTCKRGFVQFCYEPIKQIINTCMNDQKDKLWPMLAKLGVTMKSEEKELMGKPLMKRVMQNWLPASSALLEMMIFHLPSPSTAQKYRVENLYEGPLDDSYASAIRNCDPEGPLMLYVSKMIPASDKGRFFAFGRVFSGKVSTGLKVRIMGPNFVPGEKKDLYLKSVQRTVIWMGKKQETVEDVPCGNTVALVGLDQYITKNATLTNEKEVDAHPIRAMKFSVSPVVRVAVQCKVASDLPKLVEGLKRLAKSDPMVVCSIEESGEHIIAGAGELHLEICLKDLQDDFMGGAEIIKSDPVVSFRETV

SEQ ID NO: 1023 - protein, 71 aa, Ambrosia Psilostachya; identical to SEQ ID NO: 924

SEQ ID NO: 1024 - protein, 139 aa, Ambrosia Psilostachya
PNHRLLPSFVEPLIIMAREENVYMAKLSEQAERYEEMVQYMENVSNSLTDSEELTIEERNLLSVAYKNVIGARRASWRIISSIEQKEESRGNQDHVSVIKDYRSKIEKELSDICDGILKLLDSKLVPSAGSGDSKVFYL

SEQ ID NO: 1025 - protein, 265 aa, Ambrosia Psilostachya
IIYKKTTKMASETKPDVSNSDKDEQVQRAKLAEQAERYDDMAAAMKLVTETGVELSNEERNLLSVAYKNVVGARRSSWRVISSIEQKTEGSERKQQMAREYREKVEKELREICYDVLNLLDKFLIPKATNAESKVFYLKMKGDYYRYLAEVATGDARTGVVEESQKAYQEAFDISKNKMQPTHPIRLGLALNFSVFYYEILNAPERACQLAKQAFDDAIAELDTLNEDSYKDSTLIMQLLRDNLTLWTSDTQADEDEPEEKKESK

SEQ ID NO: 1026 - protein, 318 aa, Ambrosia Psilostachya
AFDQNTCTPFLVNNTHPASNNLRFCTLPPLYQLFSSLHITMGYEDSVYLAKLAEQAERYEEMVENMKAVASADQELSVEERNLLSVAYKNVIGARRASWRIVTSIEQKEESKGNETQVTLIKEYRQKIEAELAKICEDILECLDGHLIPSAESGESKVFYHKMKGDYHRYLAEFASGEKRKVAATAAHEAYKTATDVAQTELTPTHPIRLGLALNFSVFYYEILNSPDRACHLAKQAFDDAIAELDSLSEESYRDSTLIMQLLRDNLTLWTSSDGNEGEAAGATDAPKEEAKTTEDAPAASEPKADEQPPAAAPAPAA

SEQ ID NO: 1027 - protein, 310 aa, Ambrosia Psilostachya
SPPTVYPSIRICTHPHSLPITQTHINSTITMATERESKTFLARLCEQAERYDEMVTYMKEVAKVAGELTVDERNLLSVAYKNVVGTRRASWRIISSIEQKEESKGNETQVTLIKEYRQKIEAELAKICEDILECLDGHLIPSAESGESKVFYHKMKGDYHRYLAEFASGEKRKVAATAAHEAYKTATDVAQTELTPTHPIRLGLALNFSVFYYEILNSPDRACHLAKQAFDDAIAELDSLSEESYRDSTLIMQLLRDNLTLWTSSDGNEGEAAGATDAPKEEAKTTEDAPAASEPKADEQPPAAAPAPAA

SEQ ID NO: 1028 - protein, 135 aa, Ambrosia Psilostachya
IFYLKMKGDYFRYLAEFKTGADRKEAAESTLLAYKSAQDIALSDLAPTHPIRLGLALNFSVFYYEILNSPDRACNLAKQAFDEAIAELDTLGEDSYKDSTLIMQLLRDNLTLWTSDIADEAGDEIKESTKAEETQ

SEQ ID NO: 1029 - protein, 292 aa, Ambrosia Psilostachya
IIPPFHFSPLSCLPNNLFSPHSSFVHRFIYKMSNEKERETHVYSAKLAEQAERYDEMVESMKNVAKLNVELTVEERNLLSVGYKNVIGARRASWRIMSSIEQKEESKGNENNVSLIKGYRKKVEDELSKICSDILDIIDKHLIPSSGSGEATVFYYKMKGDYFRYLAEFKTDEERKEAADQSLKGYEAASASASTDLPSTHPIRLGLALNFSVFYYEIMNSPEKACHLAKQAFDEAIAELDTLSEESYKDSTLIMQLLRDNLTLWTSDLPEDGGDENPKGEEPKSAEPEKKQ

SEQ ID NO: 1030 - protein, 233 aa, Ambrosia Psilostachya
VEKVSETDELTLEERNLLSVAYKNVIGARRASWRIISSIEQKEESRGNEDHVKVIKDYRAKIEAELTRICDGILKLLDSRLVPSASSGDSKVFYLKMKGDYHRYLAEFKTAGERKDAAESTLTAYKSAQDIANTELAPTHPIRLGLALNFSVFYYEILNSPDRACSLAKQAFDEAIAELDTLGEESYKDSTLIMQLLRDNLTLWTSDMQEDGADEIKEASGAKQSEDQEQQQQ

SEQ ID NO: 1031 - protein, 303 aa, Ambrosia Psilostachya
QPLFPPLFSPLHTFPLNNLTPKPLTHLQTHPNLSDHHPNPNKMSLSDREQNVYMAKLAEQAERYDEMVEFMEKVSQTEELTVEERNLLSVAYKNVIGARRASWRIISSIEQKEESRGNEEHVKVIKEYRGKIESELTKVCDGILKLLDSRLIPKASSGDSKVFYLKMKGDYHRYLAEFKTAGERKDAAESTLTAYKSAQDIANTELAPTHPIRLGLALNFSVFYYEILNSPDRACSLAKQAFDEAIAELDTLGEESYKDSTLIMQLLRDNLTLWTSDMQEDGADEIKEASGAKQSEDQEQQQQ

SEQ ID NO: 1032 - protein, 276 aa, Anthoxanthum Odoratum
PLRIRASQRATMSPAEPTREESVYMAKLAEQAERYEEMVEFMERVAKATGGAGPGEELSVEERNLLSVAYKNVIGARRASWRIISSIEQKEESRGNDAHAATIRSYRSKIEAELAKICDGILALLDSHLVPSAAAAESKVFYLKMKGDYHRYLAEFKSGAERKEAAESTMNSYKAAQDIALADLAPTHPIRLGLALNFSVFYYEILNSPDRACNLAKQAFDEAISELDSLGEESYKDSTLIMQLLRDNLTLWTSDTNEDGGDEIKEAPAPKESEGQ

SEQ ID NO: 1033 - protein, 235 aa, Anthoxanthum Odoratum
QTRGKMSTAEATREENVYMAKLAEQAERYEEMVEFMEKVAKTADVGELTVEERNLLSVAYKNVIGARRASWRIISSIEQKEESRGNEAYVASIKEYRTRIETELSKICDGILKLLDSHLVPSATAAESKVFYLKMKGDYHRYLAEFKAGTERKEAAENTLVAYKSAQDIALADLPTTHPIRLGLALNFSVFYYEILNSPDRACNLAKQAFDEAIAELDSLGEESYKDSTLIMQLL

SEQ ID NO: 1034 - protein, 272 aa, Betula Verrucosa
LFGIAKMSPADSSREENVYMAKLAEQAERYEEMVEFMEKVAKTVDVEELSVEERNLLSVAYKNVIGARRASWRIISSIEQKEESRGNEDHVAVIKEYRGKIESELSKICDGILSLLESHLIPSASSAESKVFYLKMKGDYHRYLAEFKTSAERKEAAESTLLAYKSAQDIALAELAPTHPIRLGLALNFSVFYYEILNSPDRACNLAKQAFDEAISELDTLGEESYKDSTLIMQLLRDNLTLWTSDITDDAGDEIKEASKRESAEGQQPPSQ

SEQ ID NO: 1035 - protein, 264 aa, Betula Verrucosa
SISEKMSTEKERETQVYLAKLAEQAERYEEMVECMKNVARLDLELTVEERNLLSVGYKNVIGARRASWRIMSSIEQKEESKGNEHNVKLIKGYRQRVEEELSKICYDILGIIDKHLIPSSTSGEATVFYYKMKGDYYRYLAEFKIDQERKEAAEESLKGYEAASATANTDLPSTHPIRLGLALNFSVFYYEIMNSPERACHLAKQAFDEAIAELDTLSEESYKDSTLIMQLLRDNLTLWTSDLPEDGGEDNLKVEESKPTEAEH

SEQ ID NO: 1036 - protein, 313 aa, Betula Verrucosa
ALFSEKKKKKEKINDDLSTSLLLHSTENNSFFPTLQDSLSIVKFRFHLNVTQFTSLSPSLSLFAPMASSLTREQYVYMAKLSEQAERYEEMVEYMEKLVTGSTPAAELNVEERNLLSVAYKNVIGSLRAAWRIVSSIEQKEEGRKNEEHVVLVKEYRSKMESELSVVCAGILKLLDSHLVPSALSGESKVFYLKMKGDYHRYLAEFKVGDERKAAAEDTMLAYKAAQDIALADLAPTHPIRLGLALNYSVFYYEILNSSEKACSMAKQAFEEAIAELDTLGEDSYKDSTLIMQLLRDNLTLWTSDMQEQIDEA

SEQ ID NO: 1037 - protein, 312 aa, Betula Verrucosa
PPSQHPLSTPPPPTSPPHSRPPLPSTTPRNTPAEMATERESKTFLARLCEQAERYDEMVTYMKEVAKIGGELTVDERNLLSVAYKNVVGTRRASWRIISSIEQKEEAKGTEKHVGIIREYRQKIELELEKVCEDVLNVLDESLIPKAETGESKVFYHKMKGDYHRYLAEFASGPKRKGAATAAHEAYKSATDVAQTELTPTHPIRLGLALNFSVFYYEILNSPDRACHLAKQAFDDAIAELDSLSEESYRDSTLIMQLLRDNLTLWTSADGNEGEGAKEEKPEEEAQAPAAEAAAAPAEEKPEEAKPVEADS

SEQ ID NO: 1038 - protein, 190 aa, Cynodon Dactylon
SIEQKEEGRGNEDRVTLIKDYRGKIETELTKICDGILKLLESHLVPSSTAPESKVFYLKMKGDYYRYLAEFKTGTERKDAAENTMVAYKAAQDIALAELAPTHPIRLGLALNFSVFYYEILNSPDRACSLAKQAFDEAISELDTLSEESYKDSTLIMQLLRDNLTLWTSDISEDPAEEIREAAPKSGEGQ

SEQ ID NO: 1039 - protein, 135 aa, Cynodon Dactylon
VFYLKMKGDYHRYLAEFKTGAERKEAADATLAAYQAAQDIAIKELPPTHPIRLGLALNFSVFYYEILNSPDRACSLAKQAFDEAISELDTLGEESYKDSTLIMQLLRDNLTLWTSDMQDDGGDEMRDASKPEDEQ

SEQ ID NO: 1040 - protein, 334 aa, Cynodon Dactylon
PPRHPTAMRVPHPPHPGGRVLLKCPTPPVASPNRTDASHPPQEDPLRRANPVAFPVPGSPEEIPPPAAMSPSEPTREESVYMAKLAEQAERYEEMVEFMERVARSAGGAGGGEELSVEERNLLSVAYKNVIGARRASWRIISSIEQKEEGRGNEAHAASIRAYRSKIEAELARICDGILALLDSHLVPSAGAAESKVFYLKMKGDYHRYLAEFKSGTERKEAAESTMNAYKAAQDIALADLAPTHPIRLGLALNFSVFYYEILNSPDRACNLAKQAFDEAISELDSLGEESYKDSTLIMQLLRDNLTLWTSDTNEDGGDEIKEAAAPKESGDAQ

SEQ ID NO: 1041 - protein, 248 aa, Cynodon Dactylon
MAKLAEQAERYEEMVEYMEKVAKTVDVEELTVEERNLLSVAYKNVIGARRASWRIVSSIEQKEESRKNEEHVNLIKEYRGKIEAELSNICDGILKLLDSHLVPSSTAAESKVFYLKMKGDYHRYLAEFKTGAERKESAESTMVAYKAAQDIALAELAPTHPIRLGLALNFSVFYYEILNSPDKACNLAKQAFDEAISELDTLGEESYKDSTLIMQLLRDNLTLWTSDLTEEGAEDGKEASKGEAGEGQ

SEQ ID NO: 1042 - protein, 248 aa, Cynodon Dactylon
MAKLAEQAERYEEMVEYMEKVAKTVDVEELTVEERNLLSVAYKNVIGARRASWRIVSSIEQKEESRKNEEHVNLIKEYRGKIEAELSNICDGILKLLDSHLVPSSTAAESKVFYLKMKGDYHRYLAEFKTGAERKESAESTMVAYKAAQDIALAELAPTHPIRLGLALNFSVFYYEILNSPDKACNLAKQAFDEAISELDTLGEESYKDSTLIMQLLRDNLTLWTSDLTEEGAEEGKEAPKGDAGEGQ

SEQ ID NO: 1043 - protein, 280 aa, Fraxinus Excelsior
FRQHTQNSPSKKRALSQSRSLSLNSMASNREENVYVAKLAEQAERYEEMVEYMEKVATAVEGDELTMEERNLLSVAYKNVIGARRASWRIISSIEQKEESRGNEGHVSTIKGYRSKIESELSSICDGILKLLDSKLIGSASSGDSKVFYLKMKGDYYRYLAEFKTGAERKEAAENTLSSYKSAQDIANAELAPTHPIRLGLALNFSVFYYEILNSSDLACNLAKQAFDEAIAELDSLGEESYKDSTLIMQLLRDNLTLWTSDMQDDGSEEIKEAPKPDNE

SEQ ID NO: 1044 - protein, 269 aa, Fraxinus Excelsior
VLFNILKMSPADSSREENVYMAKLAEQAERYEEMVEFMEKVAKTVSTEELTVEERNLLSVAYKNVIGARRASWRIISSIEQKEESRGNEDHVNVIKEYRSKIEAELSKICDGILSLLESHLVPSASSAETKVFYLKMKGDYHRYLAEFKTGAERKEAAESTLVAYKSAQDIALADLAPTHPIRLGLALNFSVFYYEILNSPDRACNLAKQAFDEAIAELDTLGEESYKDSTLIMQLLRDNLTLWTSDITDDAGDEIKEASKPETGEGHQ

SEQ ID NO: 1045 - protein, 70 aa, Fraxinus Excelsior
SRGNEDHVKVLKEYRAKIEAELSKISGGILSLLDSHLITSASTAESKVFYLKMKGDYHRYLAEFKTGAER

SEQ ID NO: 1046 - protein, 301 aa, Fraxinus Excelsior
REKKVKKERRIIFIFTISSDSSLTQEDIEMEKEREQQVYLARLAEQAERYDEMVEAMKSVAKLDVELTVEERNLVSVGYKNVIGARRASWRILSSIEQKEESKGHEQNVKRIKNYRQRVEDELTKICNDILSVIDEHLLPSSSTGESTVFYYKMKGDYYRYLGEFKTGDDRKEAADQSLKAYEAATSSASTDLPPTHPIRLGLALNFSVFYYEILNSPERACHLAKQAFDEAIAELDSLNEESYKDSTLIMQLLRDNLTLWTSDLPEEGGEQSKGDEAQREVRFYDYNPVYNNIFKSLVST

SEQ ID NO: 1047 - protein, 36 aa, Lollium Perenne
QTRGRMSTAEATREENVYMAKLAEQAERYEEMVEFM

SEQ ID NO: 1048 - protein, 314 aa, Lollium Perenne
HAGPAPSAPGDLLKSPPLPAPASPTNTFTSSVPGSPQLPPYLPLAHPTMSPAEPTREESVYMAKLAEQAERYEEMVEFMERVAKATGGAGPGEELSVEERNLLSVAYKNVIGARRASWRIISSIEQKEEGRGNDAHAATIRSYRTKIEAELAKICDGILALLDSHLVPSAGAAESKVFYLKMKGDYHRYLAEFKSGAERKEAAESTMNSYKAAQDIALADLAPTHPIRLGLALNFSVFYYEILNSPDRACNLAKQAFDEAISELDSLGEESYKDSTLIMQLLRDNLTLWTSDTNEDGGDEIKEAPAPKESGEGQ

SEQ ID NO: 1049 - protein, 196 aa, Lollium Perenne
SWRIISSIEQKEESRGNEAYVASIKEYRTRIETELSKICDGILKLLDSHLVPSATAAESKVFYLKMKGDYHRYLAEFKAGAERKEAAENTLVAYKSAQDIALADLPTTHPIRLGLALNFSVFYYEILNSPDRACNLAKQAFDEAIAELDSLGEESYKDSTLIMQLLRDNLTLWTSDNADEGGDEIKEASKPEGEGH

SEQ ID NO: 1050 - protein, 117 aa, Lollium Perenne
NPQKLKMAELSREENVYMAKLAEQAERYEEMVEFMEKVAKTVDSEELTVEERNLLSVAYKNVIGARRASWRIISSIEQKEESRGNEDRVTLIKDYRGKIETELTKICDGILKLLDSH

SEQ ID NO: 1051 - protein, 249 aa, Lollium Perenne
MAKLAEQAERYEEMVEYMEKVAKTVDVEELTVEERNLLSVAYKNVIGARRASWRIVSSIEQKEEGRGNEEHVTLIKEYRGKIEAELSKICDGILKLLDSHLVPMSTAAESKVFYLKMKGDYHRYLAEFKASAERKEAAESTMVAYKAAQDIALAELAPTHPIRLGLALNFSVFYYEILNSPDKACNLAKQAFDEAISELDTLGEESYKDSTLIMQLLRDNLTLWTSDLTEEGGAEDGKEASKGEGAEGQ

SEQ ID NO: 1052 - protein, 249 aa, Lollium Perenne
MAKLAEQAERYEEMVEYMEKVAKTVDVEELTVEERNLLSVAYKNVIGARRASWRIVSSIEQKEEGRGNEEHVTLIKEYRGKIEAELSKICDGILKLLDSHLVPMSTAAESKVFYLKMKGDYHRYLAEFKASAERKEAAESTMVAYKAAQDIALAELAPTHPIRLGLALNFSVFYYEILNSPDKACNLAKQAFDEAISELDTLGEESYKDSTLIMQLLRDNLTLWTSDITDDAGDEIKEASKPETGEGHQ

SEQ ID NO: 1053 - protein, 278 aa, Olea Europaea
RKREGSSSSLPYSQTHHSHRREDSEMEKEREQLVYLARLAEQAERYDEMVEAMKNVAKLDVELTVEERNLVSVGYKNVIGARRASWRILSSIEQKEESKGHEQNVKRIKSYRQRVEDELTKICNDILSVIDEHLLPSSSTGESTVFYHKMKGDYYRYLGEFKTGDDRKEAADQSLKAYEAATSAASTDLPPTHPIRLGLALNFSVFYYEILNSPERACHLAKQAFDEAIAELDSLNEESYKDSTLIMQLLRDNLTLWTSDLPEEGGEQSKGDDAQGES

SEQ ID NO: 1054 - protein, 263 aa, Olea Europaea
SRSLSLNSMASNREENVYMAKLAEQAERYEEMVEYMEKVVTAVDGDELTVEERNLLSVAYKNVIGARRASWRIISSIEQKEESRGNEGHVSTIKGYRSKIESELSSICDGILKLLDSKLIGSASSGDSKVFYLKMKGDYYRYLAEFKTGPERKEAAEHTLSSYKSAQDIANAELAPTHPIRLGLALNFSVFYYEILNSPELACNLAKQAFDEAIAELDTLGEESYKDSTLIMQLLRDNLTLWTSDMQDDGSEEIKEAPKPDNE

SEQ ID NO: 1055 - protein, 269 aa, Olea Europaea
VLYSTVKMSPADSSREENVYMAKLAEQAERYEEMVEFMEKVAKTVNAEEFSVEERNLLSVAYKNVIGARRASWRIISSIEQKEESRGNEDHVNVIKEYRVKIEAELCKICDGILSLLESHLIPSASSAESKVFYLKMKGDYHRYLAEFKTGAERKEVAESTLLAYKSAQDIALADLSPTHPIRLGLALNFSVFYYEILNSPDRACNLAKQAFDEAIAELDTLGEESYKDSTLIMQLLRDNLTLWTSDITDDAGDEIKDTSKPESGEEQQ

SEQ ID NO: 1056 - protein, 303 aa, Olea Europaea
IPSTPHISKPPNPFTLFPSDLIHILPSPCISFLFQKSGSPTIMAATAREENVYKAKLAEQAERYEEMVEFMEKVSESLTVNEELTVEERNLLSVAYKNVIGARRASWRIISSIEQKEESRGNEDHVSTIKDYRSKIESELSNICDGILKLLESKLIVSASSGDSKVFYIKMKGDYHRYLAEFKTGAERKEAAESTLTAYKAAQDIANAELAPTHPIRLGLALNFSVFYYEILNSPDRACSLAKQAFDEAIAQLDTLGEESYKDSTLIMQLLRDNLTLWTSDMQDDGTDDIKEAPKRDDEQQGE

SEQ ID NO: 1057 - protein, 269 aa, Plantago Lanceolata
TTSQPYRFEHLKMSREENVYMAKLAEQAERYEEMVEFMEKVAKTSDTDELTVEERNLLSVAYKNVIGARRASWRIISSIEQKEESRGNEDHVTIIKDYRGKIEAELSKICDGILNLLETHLVPAASSAESKVFYLKMKGDYHRYLAEFKTGAERKEAAESTLLAYKSAQDIALADLAPTHPIRLGLALNFSVFYYEILNSPDRACNLAKQAFDEAISELDTLGEESYKDSTLIMQLLRDNLTLWTSDTTDDAGDEIKETTKLVPGEGQE

SEQ ID NO: 1058 - protein, 283 aa, Plantago Lanceolata
PHIIPLSLSHFPSKFTQSITPPIPNPPPMAAREDNVYMAKLAEQAERYEEMVEFMEKVSASLSDSDELTVEERNLLSVAYKNVIGARRASWRIISSIEQKEESRGNESHVSAIKSYRSKIENELSGICDGILKLLDTKLIGSAGNGDSKVFYLKMKGDYHRYLAEFKTGAERKEAAENTLSAYKAAQDIANAELAPTHPIRLGLALNFSVFYYEILNSPDRACNLAKQAFDEAIAELDTLGEESYKDSTLIMQLLRDNLTLWTSDMQDDNSEEIKEAPKPDNE

SEQ ID NO: 1059 - protein, 286 aa, Plantago Lanceolata
PHIIPLSLSHFPSKFTQSITPPIPNPPPMAAREDNVYMAKLAEQAERYEEMVEFMEKVSASLSDSDELTVEERNLLSVAYKNVIGARRASWRIISSIEQKEESRGNEEHVSTIKDYRSKIEKELSDICDGILKLLDSRLIPSAATGDSKVFYLKMKGDYHRYLAEFKTGANRKEAAESTLTAYKAAQDIANSELAPTHPIRLGLALNFSVFYYEILNSPDRACNLAKQAFDEAIAELDTLGEESYKDSTLIMQLLRDNLTLWTSDMQDEAADEVKEAPKAEEAEQQ

SEQ ID NO: 1060 - protein, 283 aa, Plantago Lanceolata
PHIIPLSLSHFPSKFTQSITPPIPNPPPMAAREDNVYMAKLAEQAERYEEMVEFMEKVSASLSDSDELTVEERNLLSVAYKNVIGARRASWRIISSIEQKEESRGNESHVSAIKSYRSKIEDELSGICDGILKLLDTKLIGSAASGDSKVFYLKMKGDYHRYLAEFKTGAERKEAAENTLSAYKAAQDIANAELAPTHPIRLGLALNFSVFYYEILNSPDRACNLAKQAFDEAIAELDTLGEESYKDSTLIMQLLRDNLTLWTSDMQDDTSEEIKEAPKPDNE

SEQ ID NO: 1061 - protein, 267 aa, Plantago Lanceolata
CKWLKMSPAESSREDYVYLAKLAEQAERYEEMVEFMEKVAKSTESDELTVEERNLLSVAYKNVIGARRASWRIISSIEQKEESRGNEDHVKVIKEYRGKIETELNKICDGILGLLDSHLVPSAASAESKVFYLKMKGDYYRYLAEFKIGAERKEAAENTLAAYKSAQDIALADLAPTHPIRLGLALNFSVFYYEILNSPDRACNLAKQAFDEAISELDTLGEESYKDSTLIMQLLRDNLTLWTSDTTDDAGDEIKESGKNDSGEGHE

SEQ ID NO: 1062 - protein, 276 aa, Plantago Lanceolata
IVLFPSFPDPSAMTTEKERETHVYLAKLAEQAERYDEMVECMKQVAKLDVELSVDERNLLSVGYKNVIGARRASWRIMSSIEQKEESKGNENNVKLIKDYRQKVEDELSKICYDILEVIDKHLVPSSGSGEATVFYYKMKGDYFRYLAEFKTDQEKKEAAEQSLKGYEAASATANTDLPSTHPIRLGLALNFSVFYYEIMNSPERACHLAKQAFDEAIAELDTLSEESYKDSTLIMQLLRDNLTLWTSDLPEDGGDENGKAEETNTKPDENEKLLG

SEQ ID NO: 1063 - protein, 317 aa, Poa Pratensis
PTRRHCHAGPAPSAPGDLLKSPPLLLRLPHKRVHLSPPSPDPLAHPSLFATMSPAEPTREESVYMAKLAEQAERYEEMVEFMERVAKATGGAGPGEELSVEERNLLSVAYKNVIGARRASWRIISSIEQKEEGRGNDAHAATIRSYRTQIEAELAKICEGILALLDSHLVPSAGAAESKVFYLKMKGDYHRYLAEFKSGAERKEAAESTMNAYKAAQDIALADLAPTHPIRLGLALNFSVFYYEILNSPDRACNLAKQAFDEAISELDSLGEESYKDSTLIMQLLRDNLTLWTSDTNEEGGDDIKEAPAPKESGDGQ

SEQ ID NO: 1064 - protein, 265 aa, Poa Pratensis
QTRGKMSTAEATREENVYMAKLAEQAERYEEMVEFMEKVAKTADVGELTVEERNLLSVAYKNVIGARRASWRIISSIEQKEESRGNEAYVASIKEYRTRIETELSKICDGILKLLDSHLVPSATAAESKVFYLKMKGDYHRYLAEFKAGAERKEAAENTLVAYKSAQDIALADLPTTHPIRLGLALNFSVFYYEILNSPDRACNLAKQAFDEAIAELDSLGEESYKDSTLIMQLLRDNLTLWTSDNADEGGDEIKEASKPEGEGH

SEQ ID NO: 1065 - protein, 265 aa, Poa Pratensis
RTRGKMSTAEATREENVYMAKLAEQAERYEEMVEFMEKVAKTADVGELTVEERNLLSVAYKNVIGARRASWRIISSIEQKEESRGNEAYVASIKEYRTRIETELSKICDGILKLLDSHLVPSATAAESKVFYLKMKGDYHRYLAEFKAGAERKEAAENTLVAYKSAQDIALADLPTTHPIRLGLALNFSVFYYEILNSPDRACNLAKQAFDEAIAELDSLGEESYKDSTLIMQLLRDNLTLWTSDNADEGGDEIKEASKPEGEGH

SEQ ID NO: 1066 - protein, 328 aa, Quercus Alba
LSSHPGGQRAWGSEHPSLYLSGHVLLNPQKQFQTLLSFSTFISFFISFHCILFVWLRLRLETERLAMAIDKERENHVYIAKLAEQAERYDEMVDAMTKVANMDVELSVEERNLLSVAYKNVVGARRASWRILSSLEQKEESKGNDLNVKRIKNYRHEIESELSRVCADIIALIDEHLIPSCSVGESPVFFYKMKGDYYRYLAEFRADDERKETADLSMKAYQAASTTAEAELPPTHPIRLGLALNFSVFYYEIMNSPERACALAKQAFDEAISELDSLSEESYKDSTLIMQLLRDNLTLWTSDIPENEVEEAPKLDSNAKAGGGEDAE

SEQ ID NO: 1067 - protein, 299 aa, Quercus Alba
LFHFCSHTSFLSLTRTHTQRERNFSFFANQRAKMSPTDSSREENVYMAKLAEQAERYEEMVEFMEKVAKTVDVEELTVEERNLLSVAYKNVIGARRASWRIISSIEQKEESRGNEDHVVIIKEYRGKIENELSKICDGILGLLETHLIPSASAAESKVFYLKMKGDYHRYLAEFKTGAERKEAAESTLLAYKSAQDIALAELPPTHPIRLGLALNFSVFYYEILNSPDRACNLAKQAFDEAISELDTLGEESYKDSTLIMQLLRDNLTLWTSDITDDAGDEIKEASKRESGEGQPPQQQ

SEQ ID NO: 1068 - protein, 251 aa, Ambrosia Artemisiifolia
REENVYMAKLSEQAERYEEMVQYMENVSNSLTDSEELTIEERNLLSVAYKNVIGARRASWRIISSIEQKEESRGNQDHVSVIKDYRSKIEKELSDICDGILKLLDSKLVPSAGSGDSKVFYLKMKGDYHRYLAEFKTGAERKEAAESTLNAYKAAQDIANAELAPTHPIRLGLALNFSVFYYEILNSPDRACGLAKQAFDEAIAELDTLGEDSYKDSTLIMQLLRDNLTLWTSDMQDEGADEIKEAKQSEE

SEQ ID NO: 1069 - protein, 248 aa, Ambrosia Artemisiifolia
REQNVYMAKLAEQAERYDEMVEFMEKVSQTEELTVEERNLLSVAYKNVIGARRASWRIISSIEQKEESRGNEEHVKVIKEYRGKIESELTKVCDGILKLLDSRLIPKASSGDSKVFYLKMKGDYHRYLAEFKTAGERKDAAESTLTAYKSAQDIANTELAPTHPIRLGLALNFSVFYYEILNSPDRACSLAKQAFDEAIAELDTLGEESYKDSTLIMQLLRDNLTLWTSDMQEDGGDEIKEAASGKQS

SEQ ID NO: 1070 - protein, 248 aa, Ambrosia Psilostachya; identical to SEQ ID NO: 1069

SEQ ID NO: 1071 - protein, 255 aa, Ambrosia Psilostachya
MSLSDREQNVYMAKLAEQAERYDEMVEFMEKVSQTEELTVEERNLLSVAYKNVIGARRASWRIISSIEQKEESRGNEEHVKVIKEYRGKIESELTKVCDGILKLLDSRLIPKASSGDSKVFYLKMKGDYHRYLAEFKTAGERKDAAESTLTAYKSAQDIANTELAPTHPIRLGLALNFSVFYYEILNSPDRACSLAKQAFDEAIAELDTLGEESYKDSTLIMQLLRDNLTLWTSDMQEDGADEIKEASGAKQSED

SEQ ID NO: 1072 - protein, 260 aa, Betula Verrucosa
MSPADSSREENVYMAKLAEQAERYEEMVEFMEKVAKTVDVEELSVEERNLLSVAYKNVIGARRASWRIISSIEQKEESRGNEDHVAVIKEYRGKIESELSKICDGILSLLESHLIPSASSAESKVFYLKMKGDYHRYLAEFKTSAERKEAAESTLLAYKSAQDIALAELAPTHPIRLGLALNFSVFYYEILNSPDRACNLAKQAFDEAISELDTLGEESYKDSTLIMQLLRDNLTLWTSDITDDAGDEIKEASKRESAEG

SEQ ID NO: 1073 - protein, 264 aa, Cynodon Dactylon; identical to SEQ ID NO: 927

SEQ ID NO: 1074 - protein, 260 aa, Quercus Alba
MSPTDSSREENVYMAKLAEQAERYEEMVEFMEKVAKTVDVEELTVEERNLLSVAYKNVIGARRASWRIISSIEQKEESRGNEDHVVIIKEYRGKIENELSKICDGILGLLETHLIPSASAAESKVFYLKMKGDYHRYLAEFKTGAERKEAAESTLLAYKSAQDIALAELPPTHPIRLGLALNFSVFYYEILNSPDRACNLAKQAFDEAISELDTLGEESYKDSTLIMQLLRDNLTLWTSDITDDAGDEIKEASKRESGEG

SEQ ID NO: 1075 - protein, 198 aa, Ambrosia Artemisiifolia
YFRYYSMYGHVEKLAEEIKKGAASVEGVEAKLWQVPETLNEDVLGKMSAPPKSDVPVITANDLSEADGFVFGFPTRFGMMSAQFKAFFDSTGGLWRTQQLAGKPAGIFYSTGSQGGGQETTALTAITQLVHHGMIFVPIGYTFGAGMFEMEKVKGGSPYGAGTYAGDGSRQPSELELQQAFHQGKHIATIAKKLKGAA

SEQ ID NO: 1076 - protein, 140 aa, Ambrosia Artemisiifolia
SVEGVEAKLWQVPETLNDEVLGKMSAPPKSDAPIITPNELAEADGFIFGFPTRFGMMAAQFKAFFDATGGLWRTQQLAGKPAGIFYSTGSQGGGQETTPLTAITQLVHHGMIFVPIGYTFGAGMFEMEKVKGGSPYGAGT

SEQ ID NO: 1077 - protein, 195 aa, Ambrosia Psilostachya
MAPKIAIVYYSMYGHIKKMADAELKGIQEAGGDAKLFQVAETLPQDVLDKMYAPPKDSSVPVLEDPAVLEEFDGILFGIPTRYGNFPAQFKTFWDKTGKQWQQGSFWGKYAGVFVSTGTLGGGQETTAITSMSTLVHHGFIYVPLGYKTAFSMLANLDEVHGGSPWGAGTFSAGDGSRQPSELELNIAQAQGKAF

SEQ ID NO: 1078 - protein, 108 aa, Ambrosia Psilostachya
PIITPNELAEADGFIFGFPTRFGMMAAQFKAFFDATGGLWRTQQLAGKPAGIFYSTGSQGGGQETTPLTAITQLVHHGMIFVPIGYTFGAGMFEMEKVKGGSPYGAGT

SEQ ID NO: 1079 - protein, 203 aa, Betula Verrucosa
MATKVYIVYYSMYGHVEKLAEEIKKGASSVEGVEAQLWQVPETLQEEVLGKMSAPPKSDVAIITPNELAEADGFVFGFPTRFGMMAAQFKAFLDATGGLWRTQQLAGKPAGLFYSTGSQGGGQETTALTAITQLVHHGMIFVPIGYTFGAGMFEMESVKGGSPYGAGTFAGDGSRQPTDLELKQAFHQGQYIATITKKLKGAA

SEQ ID NO: 1080 - protein, 203 aa, Cynodon Dactylon
MAAKVYIVYYSTYGHVGKLAEEIKKGASSVEGVEAKLWQVPETLSEEVLGKMGAPPKPDVPVITPQELAEADGILFGFPTRFGMMAAQMKAFFDATGGLWREQSLAGKPAGIFFSTGTQGGGQETTPLTAITQLTHHGMVFVPVGYTFGAKLFGMDQVQGGSPYGAGTFAADGSRWPSEVELEHAFHQGKYFAGIAKKLKGSA

SEQ ID NO: 1081 - protein, 124 aa, Cynodon Dactylon
MAVKVYVVFYSTYGHVAKLAEEIKKGAASVEGVEVKLWQVPETLSEEVLGKMGAPPKTDVPVITPQELAESDGSLFGFPTRFGMMAAQMKAFFDATGGLWREQSLAGKPAGIFFSTGTQGGGQE

SEQ ID NO: 1082 - protein, 77 aa, Cynodon Dactylon
QGGGQETTPLTAVTQLTHHGMVFVPVGYTFGAKMFDMESVHGGSPYGAGTFAGDGSRWPTEVELEHAFHQGKYFAGI

SEQ ID NO: 1083 - protein, 204 aa, Quercus Alba
MATKVYIVYYSMYGHVEKLAEEIRKGAASVEGVEAKLWQVPETLPEEVLGKMSAPPKSDVPIITPDQLTDADGLVFGFPTRYGMMAAQFKAFLDATGGLWRSQQLAGKPAGLFYSTGSQGGGQETTALTAITQLVHHGMIFVPIGYTFGAGMFEMEKVKGGSPYGAGTFAGDGSRQPTELELEQAFHQGKYIAAITKKLKGGAA

SEQ ID NO: 1084 - protein, 75 aa, Quercus Alba
LAGKPAGLFYSTGSQGGGQETTPLTAITQLVHHGMIFVPIGYTFGAGMFEMEKVRGGTPYGAGTYAGDGSRQPSE

SEQ ID NO: 1085 - protein, 55 aa, Ambrosia Psilostachya
MTHPTLAIPELMRLLMDEEGLGWDEAWDVTSKYLNLFMTVILKSVTILILLFGPK

SEQ ID NO: 1086 - protein, 67 aa, Ambrosia Psilostachya
VFIIFFVFLRKPTHIPLLISSCVILFLQVNGVAQLHNDILKAELCACYVSIWPTKFQNKTNGITPRR

SEQ ID NO: 1087 - protein, 76 aa, Ambrosia Psilostachya
SLEGNEGFGRGDYFLVGKDFPSYIECQEKVDEAYRDQKRWTRMSILNTAGSYKFSSDRTIHEYARDIWNIQPLQLP

SEQ ID NO: 1088 - protein, 78 aa, Anthoxanthum Odoratum
KRIVKLVNDVGAVVNNDPDVNKYLKVVFIPNYNVSVAEVLIPGSELSQHISTAGMEASGTSNMKFSLNGCVIIGTLDG

SEQ ID NO: 1089 - protein, 894 aa, Anthoxanthum Odoratum
SFPKIVRLAQFLGRAIAVPSRPLQKAPTGSHLSPSPIRCPNSEALSPPPPHARRLRIPHHSAMSAADKVKPAANPAAEDAKAIAGNISYHAQYSPHFSPLAFGPEPAYFATAESVRDHLLQRWNDTYLHFHKTDPKQTYYLSMEYLQGRALTNAVGNLNITGAYAEAVKKFGYELEALAGQERDMALGNGGLGRLAACFLDSMATLNLPAWGYGLRYRYGLFKQRITKEGQEEVAEDWLEKFSPWEIVRHDVVYPVRFFGHVEISPDGSRKVAGGEVLNALAYDVPIPGYKTKNAISLRLWDAKASAEDFNLFQFNDGQYESSAQLHSRAQQICAVLYPGDATEEGKLLRLKQQFFLCSASLQDIIFRFKERKSDRVSGKWSEFPSKVAVQMNDTHPTLAIPELMRLLMDEEGLGWDEAWEVTNKTVAYTNHTVLPEALEKWSQAVMRKLLPRQMEIIEEIDKRFREMVISTRKDMEGKLDLMSVLDNSPQKPVVRMANLCVVSAHTVNGVAELHSNILKEELFADYVSIWPNKFQNKTNGITPRRWLRFCNPELSEIVTKWLKTDKWTSNLDLLTGLRKFADDEKLHTEWAAAKLASKKRLAKHVLDVTGVTIDPNSLFDIQIKRIHEYKRQLMNILGAVYRYKKLKEMSAEEKQKVTPRTVMVGGKAFATYTNAKRIVKLVTDVGAVVNNDPDVNKYLKVVFIPNYNVSVAEVLIPGSELSQHISTAGMEASGTSNMKFSLNGCVIIGTLDGANVEIREEVGEDNFFLFGAKADQVAGLRKDRENGLFKPDPRFEEAKNYIRSGTFGTYDYTPLLDSLEGNSGFGRGDYFLVGYDFPSYIDAQARVDEAYKNKKRWIKMSILNTAGSGKFSSDRTIAQYAKEIWGITASPVP

SEQ ID NO: 1090 - protein, 847 aa, Betula Verrucosa
QIVMAAIREVNGSTGCTISAKVPAVAQPLAEEPAAIASNINYHAQFSPHFSPFKFEPEQAYYATAESVRDRLVQQWNETYVHFHKVDPKQTYYLSMEYLQGRALTNAIGNLKVQDAYGDALKKLGHKLEEITEEEKDAALGNGGLGRLASCFLDSMATLNLPAWGYGLRYKYGLFKQRFTKEGQEEIAEDWLEKFSPWEVVRHDIVYPVRFFGHVEVNPNESRKWVGGEVVQALAYDVPIPGYNTKNTISLRLWEAKACAEDFNLFQFNDGQYESAAQLHSRAQQICAVLYPGDATENGKLLRLKQQFFLCSASLQDIIFRFKERRLGKGSWQWSEFPSKVAVQLNDTHPTLAIPELMRLLMDDEGLGWDEAWDVTTRTVAYTNHTVLPEALEKWSQALMWKLLPRHMEIIGEIDKRFIAMIQKTQSDLESKLPSMRILDDNPQKPVVRMANLCVVSAHTVNGVAQLHSDILKSELFADYVSIWPTKFQNKTNGITPRRWLRFCSPELSNIITKWLKSEQWVTNLDLLAGLRQFADNVGFQDEWASAKMANKHRLAQYIERVTGVSIDPNSLFDIQVKRIHEYKRQLLNILGAIYRYKKLKEMSPEQRKNTTARTIMFGGKAFATYTNAKRIVKLVNDVGAVVNTDPEVNSYLKVVFVPNYNVSVAEMLIPGSELSQHISTAGMEASGTSNMKFALNGCLIIGTLDGANVEIREEIREENFFLFGATADEVPRLRKERENGLFKPDPRFEEAKQFIRSGAFGSYDYNPLLESLEGNSGYGRGDYFLVGHDFPSYMDAQAKVDEAYKDRKRWQKMSILSTAGSGKFSSDRTIAQYAKEIWKIGECRVP

SEQ ID NO: 1091 - protein, 987 aa, Betula Verrucosa
ASERERAMAASQFSATPIRPEALTQCNSLTRVFGFGSRSIRSKLLSIRTLSSRPSRRCFSVKNVSGETKQKLNPITEEGAPATHTSFTPDAASIASSIKYHAEFTPLFSPERFELPKAFFATAQSVRDALLINWNATYDYYENLNQKQAYYLSMEFLQGRALLNAIGNLELNGAYAEALRKLGHKLEDVASQEPDAALGNGGLGRLASCFLDSLATLNYPAWGYGLRYKYGLFKQRITKDGQEEVAEDWLEMGNPWEIVRNDVSYPVKFYGNVVSGSDGIRHWIGGEDIMAVAYDVPIPGYKTKTTINLRLWSTKALSKDFDLYTFNAGEHTKAYEALANAEKICYILYPGDESMEGKALRLKQQYTLCSASLQDIIARFERRSGANVKWEDIPKKVAVQMNDTHPTLCIPELMRILIDLKGLSWKEAWNITQRTVAYTNHTVLPEALEKWSLELMQKLLPRHVEIIEMIDEELIQTIVSEYGTADSELLEKKLKEMRILENVDLPAELADLFVKPKESPIVVLKTKESPVVVLKTEESPVVVPSEELEKSEEAVEPVDEEDGSEEKGTQEKEMVLPEPVPEPPKMVRMANLCVVGGHAVNGVAEIHSEIVKDEVFNAFFKLWPEKFQNKTNGVTPRRWIRFCNPDLSKIITDWTGTEDWVLNTEKLAELRKFADNEDLHTQWRAAKRSNKMKVVSFLKEKTGYSVSPDAMFDIQVKRIHEYKRQLMNILGIVYRYKKMKEMSEEERRAKFVPRVCIFGGKAFSTYVQAKRIVKFITDVGATVNHDPEIGDLLKVVFVPDYNVSVAELLIPASELSQHISTAGMEASGTSNMKFAMNGCLLIGTLDGANVEIREEVGPDNFFLFGAKAHEIAGLRKERAEGKFVPDPCFEEVKEFVKSGAFGSNNYDELMGSLEGNEGFGCADYFLVGKDFPSYIECQENVDEAYQDQKRWTKMSILNTAGSYKFSSDRTIHEYAKDIWNIEPAQLP

SEQ ID NO: 1092 - protein, 902 aa, Cynodon Dactylon
SRPRPVYRIRRPPHVSPARLLEKPLPGSQTSSHSRSSIPRSWSVLVRRESPRLLDAIPQCREPAMPESKCGAAEKVAPAATPAAEKPADIAGNISYHATYSPHFAPLNFGPEQAFYATAESVRDHLIQRWNETYLHFHKTDPKQTYYLSMEYLQGRALTNAVGNLGITGAYAEAVKKFGYELEALAAEEKDAALGNGGLGRLASCFLDSMATLNLPAWGYGLRYRYGLFKQRISKEGQEEIAEDWLDKFSPWEIPRHDVVFPVRFFGHVEILPNGTRKWVGGEVMKALAYDVPIPGYKTKNAISLRLWEAKATAEDFNLFQFNDGQYESSAQLHSRAQQICAVLYPGDATEEGKLLRLKQQFFLCSASLQDMIARFKERNPDRASGKWAEFPTKVAVQLNDTHPTLAIPELMRLLMDEEGLGWDEAWDITYRTVSYTNHTVLPEALEKWSQIVMRKLLPRHMEIIEEIDKRFREMVISSHKEMEGKIDSMKVLDSSNPQKPVVRMANLCVVSSHTVNGVAELHSNILKQELFADYVSIWPSKFQNKTNGITPRRWLRFCNPELSELVTKWLKTDDWTSNLDLLTGLRKFADDEKLHAEWASAKLASKKRLAKYVLDVTGVEIDPTSLFDIQIKRIHEYKRQLLNILGVVYRYKKLKEMSAEERQKVTPRTVMLGGKAFATYTNAKRIVKLVNDVGAVVNNDPDVNKYLKVVFIPNYNVSVAEVLIPGSELSQHISTAGMEASGTSNMKFSLNGCVIIGTLDGANVEIREEVGEENFFLFGAKADQIAGLRKDRENGLFKPDPRFEEAKQLIRSGAFGSYDYEPLLDSLEGNSGFGRGDYFLVGYDFPSYIDAQNLVDKAYKDKKKWITMSILNTAGSGKFSSDRTIAQYAKEIWDIKASPVA

SEQ ID NO: 1093 - protein, 95 aa, Fraxinus Excelsior
GMFKPDPRFEEAKKFVRSGAFGTYDYNPLLDSLEGDSGYGRGDYFLVGHDFPSYMEAQARVDEAYKDRKRWIKMSILSTAGSGKFSSDRTISQYA

SEQ ID NO: 1094 - protein, 513 aa, Fraxinus Excelsior
RQIEKMATFSFYAATAVLSHRRSNSRLIDFSCRNGSCELFLTRRRVKSSFYVKSVSSEPKQEVIDPITEEGVHSYQSSFKPDAASIASSIKYHAEFTPLFSPEHFELPKAFYATAQSVRDALIINWNATYDLYEKMNVKQAYYLSMEFLQGRALLNSIGNLELSGEYAEALKKLGHSLESVASQEPDAALGNGGLGRLASCFLDSLATLNYPAWGYGLRYKYGLFKQRITKDGQEEVAENWLEMGNPWEIVRNDVSYPVKFYGKVLTGSDGKRRWIGGEDIVAVACDVPIPGYKTKTTINLRLWSTKVPSEQFDLYVFNAGEHTKACEAQANAEKICYVLYPGDESTEGKILRLKQQYTLCSASLQDIIARFERRSGGNEIWEEFPEKVAVQMNDTHPTLCIPELMRILMDLKGMSWEKAWSITQRTVAYTNHTVLPEALEKWSYELMQKLLPRHVEIIEMIDEQLIQDIISEYGTSNPEMLEKKVNAMRILENVDLPPSLADLFAKPEEIII

SEQ ID NO: 1095 - protein, 446 aa, Fraxinus Excelsior
AKPEEIIIHETSDEVVLAHEDELEEKDPQEEKVVKPKQAPIPPKMVRMANLCVVGGHAVNGVAEIHSEIVRNEVFNDFFQLWPEKFQNKTNGVTPRRWIHFCNPDLSTIISKWIGTEDWVLNTEKLAELQKFADNEDLQIEWRAAKRSNKIKVASFLKDKTGYSVNPDAMFDIQVKRIHEYKRQLLNLLGIVYRYKKMKEMTAAERKEKFVPRVCIFGGKAFSTYIQAKRIVKFITDVGATINHDPDIADLLKVVFVPDYNVSVAELLIPASELSQHISTAGMEASGTSNMKFAMNGCLLIGTLDGANVEIRQEVGEDNFFLFGAQAHEIAALRKERAEGKFVPDERFEEVKEFVKNGAFGPYNYDELMGSLEGNEGFGRADYFLVGKDFPSYIECQEKVDDAYRDQKRWTKMSILNTAGSSKFSSDRTIHEYAKDIWCIKPVELP

SEQ ID NO: 1096 - protein, 1027 aa, Fraxinus Excelsior
AHLKTAPYYTMSATTVSLLTVGSSFSNPSVFSPCNFNRLLSTSLRPTKLHRSTHIFKLSNGFSSPLQASTTDNNDSITNVTTSGSSSTITFQNVDALDSTLFIIQARNKIGLLQVITRVFKVLGLVVERATVEFEGDFFIKKFYIKNSEGKKIENVENLETIKKALMEAIEPGDASTGAEVRLGGRGVVMRKAGLGFESLGDHRAKAEKMFRLMDGFLKNDPVSLQKDIVYHVEYTVARSMFRFDDFEAYQALSHSVRDRLIERWHDTHHYFKKKDPKRLYFLSLEFLMGRSLSNSVINLGIRDQYVDALGQLGFEFEVLAEQEGDAALGNGGLARLSACQMDSLATLDFPAWGYGLRYQYGLFRQIIVDGFQHEQPDYWLNFGNPWEIERVQVSYAVKFYGTVEEEVSNGVNYKVWIPGETVEAVAYDNPIPGYGTRNAINLRLWAAKPSGQYDLESYNTGDYINAVVNRQKAEIISNVLYPDDRSYQGKELRLKQQYFFVSASVQDIIRRFKDAHENFEEFTEKVALQINDTHPSLAIVEVMRVLFDEEHLGWDKAWDIVCKIFSFTTHTVQPEGLEKIPVDLMGSLLPRHLQIIYDINYKFMEELKKKFGQDYSRHARMSIVEEGAVKSIRMANLSIVCCHMVNGVSKAHFELLKMRVFKDFYDLWPQKFQYKTNGVTQRRWIVVSNPSLCSVISKWLGTEAWVRNIDLLAGLQDYASDAELQQEWGTVKKINKMRLAEYIETLSGVKVSLDAMFDVQIKRIHEYKRQLLNILGIIHRYDCIKNMNESDRRKVVPRVCIIGGKAAPGYEIAKKIIKLCHAVAEKINNDPVVGDLLKLIFIPDYNVSVAELVIPGSDLSQHISTAGHEASGTGSMKFLMNGCLLLATADGSTVEIIEEIGADNMFLFGAKVNEVPALREQGASVRAPLQFVRVVRMVRDGYFGFKDYFESLCDTLENGKDFYLLGADFASYLEAQAAADLTFVNQEKWTRMSILSTSGSGRFSSDRTIEEYAEQTWGIEPCKCPF

SEQ ID NO: 1097 - protein, 857 aa, Lollium Perenne
RCANSEALSPPPPHALAQRIPHHTAMSAADKVKPAASPAAEDPAAIAGNISFHAQYSPHFSPLTFGPEPAYFATAESVRDHLLQRWNDTYLHFHKTDPKQTYYLSMEYLQGRALTNAVGNLNITGAYAEAVKKFGYELEALAGQERDMALGNGGLGRLAACFLDSMATLNLPAWGYGLRYRYGLFKQRITKEGQEEVAEDWLEKFSPWEIVRHDVVYPVRFFGHVEISPDGRRKAVGGEVLNALAYDVPIPGYKTKNAISLRLWDAKASAEDFNLFQFNDGQYESAAQLHSRAQQICAVLYPGDATEEGKLLRLKQQFFLCSASLQDIIFRFKERKPDRASGKWSEFPSKVAVQMNDTHPTLAIPELMRILMDEEGLGWDEAWDVTNKTVAYTNHTVLPEALEKWSQAVMRKLLPRQMEIIEEIDKRFRELVISTRKDMEGKLDSMSVLDNSPQKPVVRMANLCVVAAHTVNGVAELHSNILKEELFADYLSIWPNKFQNKTNGITPRRWLRFCNPELSEIVTKWLKTDQWTSNLDLLTGLRKFADDEKLHAEWAAAKLASKKRLAKHVLDVTGVTIDPNSLFDIQIKRIHEYKRQLMNILGAVYRYKKLKEMSAEEKQKVTPRTVMVGGKAFATYTNAKRIVKLVTDVGAVVNNDPDVNKYLKVVFIPNYNVSVAEVLIPGSELSQHISTAGMEASGTSNMKFSLNGCVIIGTLDGANVEIREEVGQDNFFLFGAKADQVAGLRKDRENGLFKPDPRFEEAKQFVRSGAFGTYDYTPLLDSLEGNSGFGRGDYFLVGYDFPSYIDAQARVDEAYKDKKRWIKMSILNTAGSGKFSSDRTIAQYAKEIWGITASPVP

SEQ ID NO: 1098 - protein, 876 aa, Olea Europaea
FSPEHFELPKAFYATAQSVRDALIINWNATYDLYEKMNVKQAYYLSMEFLQGRALLNSIGNLELTGEYAEALKKLGHSLESVASQEPDAALGNGGLGRLASCFLDSLATLNYPAWGYGLRYKYGLFKQRITKEGQEEVAENWLEMGNPWEIVRNDVSYPVKFYGKVLTGLDGKRHWIGGEDIVAVACDVPIPGYKTKTTINLRLWSTKVPSEQFDLYAFNAGEHTKAREAQTNAEKICYILYPGDESTEGKILRLKQQYTLCTASLQDIIARFERRSGGNEIWEEFPEKVAVQMNDTHPTLCIPELMRILMDFKGMSWEKAWSITQRTVAYTNHTVLPEALEKWSYELMQKLLPRHVEIIEMIDEQLIQDIISEYGISNPEMLEKKVNAMRILENVDLPASLADLFAKPEEILIHETSDEVIHETSNEVIQETSDEVIHEISDEVVPAQEDELEGKDLQEEKVVKPEHAPIPPKMVRMANLCVVGGHAVNGVAEIHSEIVKKEVFNDFFQLWPEKFQNKTNGVTPRRWIHFCNPDLSTIISKWIGTDDWVLHTEKLAELQKFADNEDLQIEWRAAKRSNKIKVATFLKEKTGYLVSPDAMFDIQVKRIHEYKRQLLNILGIVYRYKKMKEMTAAERKEKFVPRVCIFGGKAFATYIQAKRIVKFITDVGATINHDPDIGDLLKVVFVPDYNVSAAELLIPASELSQHISTAGMEASGTSNMKFAMNGCVLIGTLDGANVEIRQEVGEDNFFLFGAQAHEIAALRKERAEGKFVPDERFEEVKEFVRIGAFGPYNYDELMGSLEGNEGFGRADYFLVGKDFPSYIECQEKVDDAYRDQKRWTKMSVLNTAGSFKFSSDRTIHEYAKDIWSIKPMELS

SEQ ID NO: 1099 - protein, 856 aa, Plantago Lanceolata
IPFTNHSLRIMAPGTEKATSDSTAPAVAKVPAVAHPLAEQPAEIASNISYHAQYSPHFSPLKFEPEQAYYATAESVRDRLIKQWNETYNLFNKANPKQTYYLSMEYLQGRALSNAVGNLDVQDAYASALQQLGHQLEEIVEQEKDAALGNGGLGRLASCFLDSMATLNLPAWGYGLRYRYGLFKQRIAKEGQEEIAEDWLEKFSPWEVVRHDVVFPVRFFGQVAVLPSGARKLVGGETLQALAYDVPIPGYKTKNTNSLRLWEAKAGATDFDLFQFNDGQYESAAKLHSSAQQICAVLYPGDATESGKLLRLKQQFFLCSASLQDIIARFKERHATKEIKWSDFPSKVAVQLNDTHPTLAIPELMRLLMDEESLGWDEAWDITTRTIAYTNHTVLPEALEKWSQAVMWKLLPRHMEIITEIDKRFIQMIKSTRPDLEGKSSELCILDNDPKKPVVRMANLCVVSAHTVNGVAQLHSDILKAELFVDYVSIWPTKFQNKTNGITPRRWLKFCNPELSQIITKWLKTDQWVKNLDLLTNLRQFADNADLQSEWESAKLASKKRLASYILRVTGETIDPNTLFDIQVKRIHEYKRQLLNILGAVYRYKKLKGMSPEDRKKTTPRTIMIGGKAFATYTNAKRIVKLVNDVGAVVNTDPEVNDLLKIVFVPNYNVSVAEVLIPGSELSQHISTAGMEASGTSNMKFALNGCLIIGTLDGANVEIREEIGEDNFFLFGATADEVPRLRKEREEGKFKPDPRFEEAKQFIRSGAFGSYDYNPLLESLEGDTGYGRGDYFLVGHDFPAYMDAQERVDQAYKDRKRWAKMSILSTAGSGKFSSDRTIAQYASEIWKIKEHPVSSA

SEQ ID NO: 1100 - protein, 864 aa, Poa Pratensis
GVLPVPPFGAPRLITSPATHAHRERSTQFPTAMSAADKVKPAASPAAEDPAAIAANISYHAQYSPHFSPLAFGPEPAYFATAQSVRDHLLQRWNDTYLHFHKTDPKQTYYLSMEYLQGRALTNAVGNLDITGAYAEAVKKFGYELEALAGQERDMALGNGGLGRLAACFLDSMATLNLPAWGYGLRYRYGLFKQRIAKEGQEEIAEDWLEKFSPWEIVRHDVVYPVRFFGHVEISPDGTRKSAGGEVLKALAYDVPIPGYKTKNAISLRLWDAKASAEDFNLFQFNDGQYESAAQLHSRAQQICAVLYPGDATEEGKLLRLKQQFFLCSASLQDIIFRFKERKSDRVSGKWSEFPSKVAVQMNDTHPTLAIPELMRLLMDEEGLGWDEAWDVTNKTVAYTNHTVLPEALEKWSQSVMRKLLPRQMEIIEEIDKRFREMVISTRKDMEGKLDSMSVLDNSPQKPVVRMANLCVVSAHTVNGVAELHSNILKEELFADYVSIWPNKFQNKTNGITPRRWLKFCNPELSEIVTKWLKTDQWTSNLDLLTGLRKFADDEKLHAEWAAAKLASKKRLAKHVLDATGVTIDPTSLFDIQIKRIHEYKRQLMNILGAVYRYKKLKEMSAEEKQKVTPRTVMVGGKAFATYTNAKRIVKLVNDVGAVVNNDPDVNKYLKVVFIPNYNVSVAEVLIPGSELSQHISTAGMEASGTSNMKFSLNGCVIIGTLDGANVEIREEVGEDNFFLFGAKADQVAGLRKDRENGLFKPDPRFEEAKQYVRSGTFGTYDYTPLLDSLEGNSGFGRGDYFLVGYDFPSYIDAQARVDEAYKDKKRWTKMSILNTAGSGKFSSDRTIAQYAKEIWGITASPVP

SEQ ID NO: 1101 - protein, 542 aa, Quercus Alba
VRASEKERGENRYSKFAMAVSQFSAATSTGRSEALLTRSGLLGGGLGSRGSKSKVLLMRTWISRPVTVRRSFSVNSVSSDSNQTLKDPITQEEASTAHSSFTLDAASIASSIKYHAEFTPLFSPERFELPKAFFATAQSVRDALIINWNATYDYYEKLNVKQAYYLSMEFLQGRALLNAIGNLELTGAYAEALRNLGHKLEHVAIQEPDAALGNGGLGRLASCFLDSLATLNYPAWGYGLRYKYGLFKQRITKDGQEEVAEDWLEMGNPWEIVRNDVSYPVKFYGKVASGSDGKKHWIGGEDIKAVACDVPIPGYKTKTTINLRLWSTKALSEDFDLYAFNAGEHTKAYEALANAEKICYILYPGDESMEGKVLRLKQQYTLCSASLQDIIARFERRSGANVRWEEFPEKVAVQMNDTHPTLCIPELMRILIDLKGLSWKEAWNITQRTVAYTNHTVLPEALEKWSLELMQKLLPRHVEIIEMIDEELIHTIVSEYGTEDYELLEKKLKEMRILENVDLPSAFADLFVKLKPKESPVVVPSE

SEQ ID NO: 1102 - protein, 745 aa, Quercus Alba
ALTNAIGNLNIQDAYGDALKKLGHELEEITEQEKDAALGNGGLGRLASCFLDSMATLSLPAWGYGLRYKYGLFKQRITKEGQEEIAEDWLEKFSPWEVVRHDIIYPVRFFGSVEVNPNGSRNWVGGEVVQALAYDVPIPGYKTKNTISLRLWEAKACAEDFDLFQFNDSQYESAAELHSRAQQICAVLYPGDTKENGKLLRLKQQFFLCSASLQDIIFRFKERKLGKGSRQWSEFPSKVAVQMNDTHPTLAIPELMRLLMDEEGLGWDEAWDITTRTVAYTNHTVLPEALEKWSQAVMWKLLPRHMEIIGEIDKRFIAMIHKARPDLESKLPSMCILDNDPQKPVVRMANLCVVSAHTVNGVAQLHSDILKSELFADYVSLWPTKFQNKTNGITPRRWLRFCSPELSSIITKWLKTEEWIINLDLLTGLRQFADNADLQAEWASAKMANKQRLAEYIERVTGVSIDPNSLFDIQVKRIHEYKRQLLNILGAIYRYKNLKEMSPEERKKTTSRTIMIGGKAFATYTNAKRIVKLVNDVGAVVNNDPEVNSYLKVVFVPNYNVSVAEILIPGSELSQHISTAGMEASGTSNMKFALNGCLIIGTLDGANVEIREEIGEENFFLFGATADEVPRLRKERENGKFKPDPRFEEAKEFIRSGAFGSYDFNPLLDSLEGNSGYGRGDYFLVGQDFPSYMDAQARVDEAYKDRKRWLKMSILSTAGSGKFSSDRTIAQYAKEIWNIEECRVP

SEQ ID NO: 1103 - protein, 82 aa, Quercus Alba
CIAGDLGTFIPDSASIASSIKYHAEFTPSFSTEQFELPKAYFATAESVRDTLIINWNATYDYYEMMNVKQAYYLSMEYLQGR

SEQ ID NO: 1104 - protein, 171 aa, Ambrosia Artemisiifolia
MSNPRVYFDITIGGAPAGRIVMELFADQTPKTAENFRALCTGEKGTGRSGKPLHYQGSSFHRVIPQFMLQGGDFTRGNGTGGESIYGEKFEDENFNLRHTGPGILSMANAGPGTNGSQFFICTVKTSWLDGKHVVFGQVVEGLDVVQAIEKVGSGSGSTSKQVTIAKSGQL

SEQ ID NO: 1105 - protein, 123 aa, Ambrosia Artemisiifolia
AGRIVMELFADTTPRTAENFRALCTGEKGRGTSGKPLHYKGSSFHRVIPNFMCQGGDFTRGNGTGGESIYGNKFADENFIKKHTGPGILSMANAGPNTNGSQFFICTAKTEWLDGKHVVFGKV

SEQ ID NO: 1106 - protein, 171 aa, Ambrosia Psilostachya
MANPKVFFDMTVGGAPAGRIVMELFADTTPRTAENFRALCTGEKGRGTSGKPLHYKGSSFHRVIPNFMCQGGDFTRGNGTGGESIYGNKFADENFIKKHTGPGILSMANAGPNTNGSQFFICTAKTEWLDGKHVVFGKVVEGMDVVKAIEKVGSGSGTCSKPVVVADCGQL

SEQ ID NO: 1107 - protein, 172 aa, Betula Verrucosa
MASNPKVFFDMEVGGQPVGRIVMELYADTTPRTAENFRALCTGEKGNGRSGKPLHYKKSSFHRVIPGFMCQGGDFTAGNGTGGESIYGAKFADENFIKKHTGPGILSMANAGPGTNGSQFFICTAKTEWLDGKHVVFGQVVEGLDIVKAIEKVGSSSGRTSKPVVVADCGQL

SEQ ID NO: 1108 - protein, 171 aa, Cynodon Dactylon
MANPRVFFDMTVGGQPVGRIVMELYANEVPRTAENFRALCTGEKGTGKSGKPLHYKGSTFHRVIPDFMCQGGDFTRGNGTGGESIYGEKFPDEKFVRKHTGPGVLSMANAGPNTNGSQFFICTVACPWLDGKHVVFGQVVEGMDVVKAIEKVGSRSGTTAKEVKIADCGQL

SEQ ID NO: 1109 - protein, 172 aa, Quercus Alba
MASNPKVFFDMTIGGQPAGRIIMELYADVVPRTAENFRALCTGEKGAGRSGKPLHYKGSSFHRVIPGFMCQGGDFTAGNGTGGESIYGAKFADENFTKKHTGPGILSMANAGPGTNGSQFFICTAKTEWLDGKHVVFGQIIEGMDVVKAVEKVGSSSGRTSKPVVVADCGQL

SEQ ID NO: 1110 - protein, 15 aa, Phleum pratense
NGSQFFLCTAKTAWL

SEQ ID NO: 1111 - protein, 15 aa, Phleum pratense
NGSQFFLCTAKTAWL

SEQ ID NO: 1112 - protein, 15 aa, Phleum pratense
QYAKEIWGITANPVP

SEQ ID NO: 1113 - protein, 15 aa, Phleum pratense
FPIVQRFLEGASSID

SEQ ID NO: 1114 - protein, 15 aa, Phleum pratense
FPIVQRFLEGASSID

SEQ ID NO: 1115 - protein, 15 aa, Lollium Perenne
LIEKINAGFKAAVAA

SEQ ID NO: 1116 - protein, 15 aa, Lollium Perenne
LIEKINAGFKAAVAA

SEQ ID NO: 1117 - protein, 15 aa, Lollium Perenne
NAGFKAAVAAAAVVP

SEQ ID NO: 1118 - protein, 15 aa, Lollium Perenne
NAGFKAAVAAAAVVP

SEQ ID NO: 1119 - protein, 15 aa, Lollium Perenne
NAGFKAAVAAAAVVP

SEQ ID NO: 1120 - protein, 15 aa, Lollium Perenne
SDAKTLVLNIKYTRP

SEQ ID NO: 1121 - protein, 15 aa, Lollium Perenne
SDAKTLVLNIKYTRP

SEQ ID NO: 1122 - protein, 15 aa, Lollium Perenne
SDAKTLVLNIKYTRP

SEQ ID NO: 1123 - protein, 15 aa, Lollium Perenne
SDAKTLVLNIKYTRP

SEQ ID NO: 1124 - protein, 15 aa, Lollium Perenne
MRNVFDDVVPADFKV

SEQ ID NO: 1125 - protein, 15 aa, Lollium Perenne
MRNVFDDVVPADFKV

SEQ ID NO: 1126 - protein, 15 aa, Lollium Perenne
MRNVFDDVVPADFKV

SEQ ID NO: 1127 - protein, 15 aa, Lollium Perenne
MRNVFDDVVPADFKV

SEQ ID NO: 1128 - protein, 15 aa, Lollium Perenne
MRNVFDDVVPADFKV

SEQ ID NO: 1129 - protein, 15 aa, Lollium Perenne
NVFDEVIPTAFTVGK

SEQ ID NO: 1130 - protein, 15 aa, Lollium Perenne
NVFDEVIPTAFTVGK

SEQ ID NO: 1131 - protein, 15 aa, Lollium Perenne
DAYVATLTEALRVIA

SEQ ID NO: 1132 - protein, 15 aa, Lollium Perenne
DAYVATLTEALRVIA

SEQ ID NO: 1133 - protein, 15 aa, Lollium Perenne
DAYVATLTEALRVIA

SEQ ID NO: 1134 - protein, 15 aa, Lollium Perenne
DAYVATLTEALRVIA

SEQ ID NO: 1135 - protein, 15 aa, Lollium Perenne
AFKIAATAANAAPTN

SEQ ID NO: 1136 - protein, 15 aa, Lollium Perenne
AFKIAATAANAAPTN

SEQ ID NO: 1137 - protein, 15 aa, Lollium Perenne
AFKIAATAANAAPTN

SEQ ID NO: 1138 - protein, 15 aa, Poa Pratensis
DINVGFKAAVAAAAG

SEQ ID NO: 1139 - protein, 15 aa, Poa Pratensis
DINVGFKAAVAAAAG

SEQ ID NO: 1140 - protein, 15 aa, Poa Pratensis
DINVGFKAAVAAAAG

SEQ ID NO: 1141 - protein, 15 aa, Poa Pratensis
DINVGFKAAVAAAAG

SEQ ID NO: 1142 - protein, 15 aa, Poa Pratensis
EPIAAYHFDLSGKAF

SEQ ID NO: 1143 - protein, 15 aa, Poa Pratensis
EPIAAYHFDLSGKAF

SEQ ID NO: 1144 - protein, 15 aa, Poa Pratensis
FKAAVAAAAGAPPAD

SEQ ID NO: 1145 - protein, 15 aa, Dactylis glomerata
GSDEKNLALSIKYNK

SEQ ID NO: 1146 - protein, 15 aa, Dactylis glomerata
NLALSIKYNKEGDSM

SEQ ID NO: 1147 - protein, 15 aa, Dactylis glomerata
DIYNYMEPYVSKVDP

SEQ ID NO: 1148 - protein, 15 aa, Lollium Perenne
KASNPNYLAILVKYV

SEQ ID NO: 1149 - protein, 15 aa, Phleum pratense
NFRFMSKGGMRNVFD

SEQ ID NO: 1150 - protein, 15 aa, Phleum pratense
INVGFKAAVAAAASV

SEQ ID NO: 1151 - protein, 15 aa, Phleum pratense
INVGFKAAVAAAASV

SEQ ID NO: 1152 - protein, 15 aa, Phleum pratense
INVGFKAAVAAAASV

SEQ ID NO: 1153 - protein, 15 aa, Phleum pratense
EEWEPLTKKGNVWEV

SEQ ID NO: 1154 - protein, 15 aa, Phleum pratense
NVWEVKSSKPLVGPF

SEQ ID NO: 1155 - protein, 15 aa, Phleum pratense
NVWEVKSSKPLVGPF

SEQ ID NO: 1156 - protein, 15 aa, Phleum pratense
NVWEVKSSKPLVGPF

SEQ ID NO: 1157 - protein, 15 aa, Phleum pratense
NVWEVKSSKPLVGPF

SEQ ID NO: 1158 - protein, 15 aa, Phleum pratense
NVWEVKSSKPLVGPF

SEQ ID NO: 1159 - protein, 15 aa, Phleum pratense
NVWEVKSSKPLVGPF

SEQ ID NO: 1160 - protein, 15 aa, Phleum pratense
AFKVAATAANAAPAN

SEQ ID NO: 1161 - protein, 15 aa, Phleum pratense
AFKVAATAANAAPAN

SEQ ID NO: 1162 - protein, 15 aa, Phleum pratense
AFKVAATAANAAPAN

SEQ ID NO: 1163 - protein, 15 aa, Phleum pratense
AFKVAATAANAAPAN

SEQ ID NO: 1164 - protein, 15 aa, Phleum pratense
AFKVAATAANAAPAN

SEQ ID NO: 1165 - protein, 15 aa, Phleum pratense
STWYGKPTGAGPKDN

SEQ ID NO: 1166 - protein, 15 aa, Phleum pratense
STWYGKPTGAGPKDN

SEQ ID NO: 1167 - protein, 15 aa, Phleum pratense
STWYGKPTGAGPKDN

SEQ ID NO: 1168 - protein, 15 aa, Phleum pratense
SGIAFGSMAKKGDEQ

SEQ ID NO: 1169 - protein, 15 aa, Phleum pratense
SGIAFGSMAKKGDEQ

SEQ ID NO: 1170 - protein, 15 aa, Phleum pratense
SGIAFGSMAKKGDEQ

SEQ ID NO: 1171 - protein, 15 aa, Phleum pratense
SGIAFGSMAKKGDEQ

SEQ ID NO: 1172 - protein, 15 aa, Phleum pratense
GELELQFRRVKCKYP

SEQ ID NO: 1173 - protein, 15 aa, Phleum pratense
GELELQFRRVKCKYP

SEQ ID NO: 1174 - protein, 15 aa, Phleum pratense
GELELQFRRVKCKYP

SEQ ID NO: 1175 - protein, 15 aa, Phleum pratense
GELELQFRRVKCKYP

SEQ ID NO: 1176 - protein, 15 aa, Phleum pratense
GELELQFRRVKCKYP

SEQ ID NO: 1177 - protein, 15 aa, Phleum pratense
LAKYKANWIEIMRIK
